United States Patent Application Publication US 2008/0070235 A1 - sequence listing, part 3

SEQ ID NO: 10180 - DNA, 244 bp, Homo sapiens
  III.3808 (T65006)
  misc_feature (132)..(132): n is a, c, g, or t
  misc_feature (161)..(161): n is a, c, g, or t
  misc_feature (218)..(218): n is a, c, g, or t
  misc_feature (241)..(241): n is a, c, g, or t
ttttttttttttcttattgtaatgccatacttttaatcatttaaactaaatgtttaatcagaagttatctaatacaaaaactagtcaaaaagcacgtgaaatgtatatactttaaccaagaaattctaaaanttggtttctatagagaaaactggacagantgacaatgtatgtgacacaaaggtgtttgccacagcattttttatcacagtaaaaantagtaaaaaaaaaaaattcacangct

SEQ ID NO: 10181 - DNA, 504 bp, Homo sapiens
  III.3809 (T66087)
gatagacatgcagtcagtaaaagcctgctgatttccccagtaaagtgctttagtccacacaaagcctgatctttaatccatgcctagaattggcaaatgatgccaggaaagaaaacagttggtagtctcagctatgtagaaaagacaaagacttttagtacatctagtcttaagcgcttccacagctctttcgtatctgtaatgtattttgcatttgatccattttttcctagttactgcacctgggagcgactgccagtactaccacatcatttcggtagtggaggtccccatcgaagggtttttttcatagcacatagcatgatcacgtctaggaagatcgttctggctgtagatagtataattatctactaatacaaagggggaaaggacgtgagatggatgtgaaagggaagttttgcatccatttacttgaaagatactgtttcttctgaatttaatcacattggggattgggaaaagtaggtggataaaaatttaaaa

SEQ ID NO: 10182 - DNA, 244 bp, Homo sapiens; identical to SEQ ID NO: 10180
  III.3810 (T65006)
  misc_feature (132)..(132): n is a, c, g, or t
  misc_feature (161)..(161): n is a, c, g, or t
  misc_feature (218)..(218): n is a, c, g, or t
  misc_feature (241)..(241): n is a, c, g, or t

SEQ ID NO: 10183 - DNA, 504 bp, Homo sapiens; identical to SEQ ID NO: 10181
  III.3811 (T66087)

SEQ ID NO: 10184 - DNA, 351 bp, Homo sapiens
  III.3812 (AI470655)
taaacaataataggcattttatttaattcttccaacaactttgtgaaagtagttcccatgtccactttatggttgaggaatctttccgtttcccttcttcaaatcaacactgcaatagccagagacagaaaaggatggataagatggtgcaaagatgaagacagtcgcatccctctttccctaatgcaggtttctggatgaaaatataaaccctgctttcagctgtactggccctggctctcccaatccgcctcaggcagcatctatcatcatgtcttgttttgacagcagcgtggagctgaccactcagcgaagacagaggaaatttccaagaatagaagaaagaaaagc

SEQ ID NO: 10185 - DNA, 387 bp, Homo sapiens
  III.3813 (AI889694)
ttgtgttaagtcagttgttttattaaaaaataagcactatgcttgggtttcataaaatttatacatgaatatgtacacagacacaaataaaataatattaaaaataaaaatcacacttgctttcaaggcagtggtcctggcaccccacatacataatcaacttttcctttaaagaaattgcttggcccaaggagaccacagttagagaaccactaataaagctgtagcccgttgcctgcaacattttcaattcgggtttcaaaaatatataaataatttaattacaaaacccaacattttttttctcttttggcacagtgaagcatcggtcaatagcaagaaatcactgaagagcctctgacatgtctctcacactcagtcatacct

SEQ ID NO: 10186 - DNA, 566 bp, Homo sapiens
  III.3814 (AI652691)
taatgtattaagccatatattaccaggaagtatgcaaagtgcttcacatatattatttgatttaaatctcacaacaactctatgaggtaggcattcttattatccccattttataaacgaaggaaccaaggcacagagtttaggaaactagcccaatgtctcagagctcacttgggattgagctcatttgactctaaaccatgttctctattacctctcctcattcaataaattattccatgtaaagtggccgtaaaagtggtgggctcatagcaggtactcaagaaacaggtgtcctcttcccttgaccagacttccaaaccccaagtctgctatgtggctgtaccctttcctttctctgtggtgtgtgggtagtgactgaccttgctgtgcagttccttgggcagattcacactttgggtcctttcaaactgctccatgagggctcttgtcacctggctgtcagagccagagagcagccagaacaccctctccatgttgtagggcacctgaatgtccatagctgatgccaaggttgatttaacagcctcagagagagaaagtct

SEQ ID NO: 10187 - DNA, 565 bp, Homo sapiens
  III.3815 (AI809238)
  misc_feature (501)..(501): n is a, c, g, or t
tggggctgaggcggcgccggcggagccctgagcggctgtgacaggctacgcaacaggttcgcgggcggcggcctgacgaccaagccagctgcagtggcggcgacggcggcagagcagggtctccccgcgcctgcccgcgcccaggctgccggtgctgagggacgcggagtcgcgctgtgacgtgcgggaggcgcggcgagggcgccagatggctgagagctagcaaggaaaactcaggaccatgatggctcagtttcccacagctatgaatggagggccaaacatgtgggctattacctctgaagaacgtactaagcatgacaggcagtttgataacctcaaaccttcaggaggttacataacaggtgatcaagcacgtaattttttcctacaatcaggtctgccggcccctgttttagctgaaatatgggctttatcagacctaaacaaggatgggaagatggatcagcaagagttctccatagctatgaaactcatcanactgaagcttcaaggccaacagttgcctgtggttctccctcctattatgaagcaaccccctatg

SEQ ID NO: 10188 - DNA, 442 bp, Homo sapiens
  III.3816 (AI688729)
  misc_feature (28)..(28): n is a, c, g, or t
ttttggtattttaatgatcatttattgngaactctagacatgagagtggtttagtgtgttgcatatcaagtatcctgagatgataactttttgtagttgtttcttcatgctttcttttttagctgtaaccactgtcagtatgcttgtaggacaataacataggcagttcaagattcggattctgttacaatacattagattcgtctgagaatgttcgtaaaagaagaggtctgactgaaggtctggcggataatgagtcagatgcccttctacagctcagatttctcctggcacttcttcttcttacattctttaatactatcagaagaatctcagggaacaggctgataaatattagaagaattatagccaaccatgtggatacagaagacagcatttgggcaaatacaaaatacattctctgttgcttgagaaaaggcca

SEQ ID NO: 10189 - DNA, 773 bp, Homo sapiens
  III.3817 (AF146693)
tgcaggtgaggggagaagaatcataaggtaagctctcagagatacgagggtcaaggagaatataatatcttacattccctaacgcacctcttgctcttttgtgtttttgcatgtgacttcatgctggttgtcctctggactgtgtgaccttggcgccctcagtttcctcatcttattggtccctgtacttctaatagtcagtgggctgacagtccacacccctctgcagggctccagacctggctgtctgactttccagcaggctgtcccctcggtcatgccgcagacttttcacactgtgtccgaagctgagccttgatctgttcctgaacttgctgcccctcttttgtcctctcccatccactccactgtttgtgctagaaagtggggagatattgttggcaccttccctctcactcctacatattagccaaaggttttatagatttcacacctaagcagtgatgtttcagcctgcttccactctcccgtgctcaggataactgccttggttcagtcactttcatgtaacactcctgcctggagtacgcagcagctcctacctggtattctgattcctctccggcactcttcagtggccctctagtgctccctgagtgatcttttttttgtttgtttgtttgtttttgagacagggtctggctctgtcactcaggctggaatgcagtggcatgatcacagctcactgtagcctctaccacctggactcatcatcaataaacactgttacagcaaaaaaaaaaaaaaaaaaa

SEQ ID NO: 10190 - DNA, 365 bp, Homo sapiens
  III.3818 (T95064)
  misc_feature (136)..(136): n is a, c, g, or t
  misc_feature (182)..(182): n is a, c, g, or t
  misc_feature (226)..(226): n is a, c, g, or t
  misc_feature (257)..(257): n is a, c, g, or t
  misc_feature (306)..(306): n is a, c, g, or t
  misc_feature (315)..(315): n is a, c, g, or t
ttgcaaataacagtgtttattgatgatgagtccaggtggtagaggctacagtgagctgtgatcatgccactgcattccagcctgagtgacagagccagaccctgtctcaaaaacaaacaaacaaacaaaaaaaagntcactcagggagcactagagggccactgaagagtgccggagaggantcagattaccaggtaggagctgctgcgtactccaggcaggagtnttacatgaaagtgactgaaccaaggcagttntcctgagcacgggagagtggaagcaggctgaaacatcactgcttaggtntgaaatctntaaaacctttgggctaatatgtaggattgaggaggggaagggtgcccaac

SEQ ID NO: 10191 - DNA, 428 bp, Homo sapiens
  III.3819 (T95160)
  misc_feature (409)..(409): n is a, c, g, or t
  misc_feature (423)..(423): n is a, c, g, or t
tgagagtgaggggagaagaatcataaggtaagctctcagagatacgagggtcaaggagaatataatatcttacattccctaacgcacctcttgctcttttgtgtttttgcatgtgacttcatgctggttgtcctctggactgttgtgaccttggcgccctcagtttcctcatcttattggtccctgtacttctaatagtcagtgggctgacagtccacacccctctgcagggctccagacctgggctgtctgactttccagcaggctgtcccctcggtcatgccgcagacttttcacactgtgtccgaagctggagccttggatctgttcctggaacttggctgcccctctttttgtcctcttcccattccactccactgttttgtggctaggaaagtggggggagatnattgttggggcacnttccc

SEQ ID NO: 10192 - DNA, 310 bp, Homo sapiens
  III.3820 (AI801478)
attttactttttaatgtttcatgacacccattctaatgttgatcatttcttctcagccacagaacagcctggttcactgcacagttcccagggacttgggatgggtcctgtggaggagtcctggtttgctccttccctggagcacccacaagaagagaatgagcccagcctgcagagtaaactccaagacgaagccaactaccatctttatggcagccgcatggacaggcagacgaaacagcagcccagacagaatgtggcttacaacagagaggaggaaaggagacgcagggtctcccatgaccctttt

SEQ ID NO: 10193 - DNA, 385 bp, Homo sapiens
  III.3821 (AI582494)
  misc_feature (311)..(311): n is a, c, g, or t
agcggccgccgtgctggacatggtgcggcccaaggcccagctggtgctggctgcctgcgaaagcctgctcaccagccgccagctgcccatcttctgccagctgatcctgagaattgggaacttcctcaactacggcagccacaccggtgacgccgacggcttcaagatcagcacattgctgaagctcacggagaccaagtcccagcagaaccgcgtgacgctgctgcaccacgtgctggaggaagcggaaaagagccaccccgacctcctgcagctgccccgggacctggaacagccctcgcaagcagcanggatcaaccctgagatcattcgctcagaggccagctccaacctgaagaagcttctggagaccgagccggaagtg

SEQ ID NO: 10194 - DNA, 454 bp, Homo sapiens
  III.3822 (AI744582)
gggttttaaaagtcagggcccctctaatttaataaaatatgatatggtaggaaactacacaagccaattcccttttgaggaacacagcattaataggatgtagacaaaattccaaattttcacttctttgcctagaaactttgagcaccagagacctttacacaatgtgacccattagccttctgcttccactttcagtgcagaaagccctgcagtgatacaggtgagcactgtggagtaccagagcatcatctggtctgaccttccactttgcagataaggaaactgaaagctaggaagaagaagggatccacacagcaggcctccacttctttccttctataatagactctctttgcaataaagaaaaatgcgtttgacatacacatctccaatgtaagctgtatgcagcaggtgcagtggaatgctacagcagtcacatacacagcactaa

SEQ ID NO: 10195 - DNA, 470 bp, Homo sapiens
  III.3823 (AI567448)
gcaacatgtcagagtgggaatttattatctcagccccaataggtcttaataagccttacacaactgtttaggcatttattctattaacggctgttcattctggtggcttcacctgaatattcatgatcttcctatccccagagcttcagcatagcagctgtttaaaacccacagcaaatgttcaagagagttccacaaatataaacaccctcacagctgaatgttccagctctggcctcacagaggctaagccatgaaacatttatgtggagtggtttttggagggcagcatttacaaaacttaaataatctttcccctttagggagccctcaactctgtttgaaacataaccatgaggacaaagggtccaggaggacccaagtccacgaagataactgccccctccttgcttcctcctagaaatggaggttctgaataaattctaacaggaagggagctagagtgagct

SEQ ID NO: 10196 - DNA, 425 bp, Homo sapiens
  III.3824 (H57759)
  misc_feature (370)..(370): n is a, c, g, or t
  misc_feature (392)..(392): n is a, c, g, or t
  misc_feature (404)..(404): n is a, c, g, or t
tacactctctgcaattcatacacaagggttcttgacatggtgacaggacaggacagatcaagacagaggctctccaaggcagtgaaaagacccttcctatctcctctggcttaacctgggtttatgctcctttcctggccctgttggtataatcggcaacatctgtgttgttagagggtggagagcgcatggatcatcttagctcaaaggtaggttctaacagcatagaagatggagtagagaaaaataaatagtgtttttttttctctctgctacttactagagccatgctatctaatatgggcagacacttaaccacatgtgactttttgaggcactttgaatgtggttagttcaaattaaggacggnctgtaaaacatacaccccctgnccccggacttcntattttctttaagggcaacgg

SEQ ID NO: 10197 - DNA, 321 bp, Homo sapiens
  III.3825 (H57760)
  misc_feature (36)..(36): n is a, c, g, or t
  misc_feature (63)..(63): n is a, c, g, or t
  misc_feature (275)..(275): n is a, c, g, or t
  misc_feature (297)..(297): n is a, c, g, or t
  misc_feature (303)..(303): n is a, c, g, or t
ttgcattataacacatttatttcaaaaccgcatggnacattcaccaagatgaatgacaaggantaaaacaaatctcatcatcagaggtttgtggtgaatgagtgggcgagtgactttgatcaggtagatatgtttctgaaaacccattatgagtggagcattgtctaggaaattacaaaggaaggtgatgactcagttcttccctcaaagttgggcataatataatgagattgggccaagataatggtggatacataagtgcagtgacccaaaantgaacttgcctgatccacaggngctttnttcaggactgcatgccac

SEQ ID NO: 10198 - DNA, 538 bp, Homo sapiens
  III.3826 (AI380627)
ttttcattgcaattttcttgccttctatctcttcatagatgcttgagagatactcttctggcagatctttactatcattgataccccgattcattttaatatactgctctttcgtcattttattttttacctgaggactgtgcaagtctgtagtcagcataataattgaatacgctaggacataagcagtgtcagcactagcaaacagagtttgcccttggttgcattctatgtatcttgcggcaaacttctccattaatcggtcaatcttttgggcttctccaggtaggcggaaaccttctaggaatgtccgcagggctgagacaaattctttttcacagaagtcaagttggtccacgtaggcatacatcacctccttgttgaaccttgcgctatctcccagaaaatcgcctacttgggtggaatccaggcgctcctcctggtgcaggaattgggctatgtcttcaactgacgttcccagcatgccctgctcctggagagactggatccccctcttgggtttcttgttgaacctgtt

SEQ ID NO: 10199 - DNA, 448 bp, Homo sapiens
  III.3827 (R25508)
  misc_feature (285)..(285): n is a, c, g, or t
  misc_feature (364)..(364): n is a, c, g, or t
  misc_feature (372)..(372): n is a, c, g, or t
  misc_feature (387)..(387): n is a, c, g, or t
  misc_feature (411)..(411): n is a, c, g, or t
  misc_feature (433)..(433): n is a, c, g, or t
  misc_feature (438)..(438): n is a, c, g, or t
ttagaagttaggatgaatacatgttacactgttaacttttagcaaattttacttttgttgaaaactttgtgtttgggattttaattatccttcgcaattaataagacatcatttagtccaaattaacttagaattggtatagatgattccttcctggttctgtaagtactttaaggcttggctgagtacaaacagctcacacatttgagcagaccaattattaggcaattttcctaacttcatttctacaagagtttgtttccctattagttactgggatacccntagtgtcttcttccctcagtcacccagggaggaaaccatctatcatcctgccctgaaggggagttcctcctagggtctnggtcagancctcttgtatggggncattaatttaagggttttggatcntccccgtttagggaggaccccnctggnggtttaaggg

SEQ ID NO: 10200 - DNA, 433 bp, Homo sapiens
  III.3828 (R45572)
  misc_feature (368)..(368): n is a, c, g, or t
  misc_feature (385)..(385): n is a, c, g, or t
  misc_feature (412)..(412): n is a, c, g, or t
  misc_feature (426)..(426): n is a, c, g, or t
tttttttttttatggagtcttcaaatttatttagtcaaatattagaacaagtcatttaattagcaaaggtaaatggctaattgagcttgaacggattaaaggcatcatatcctttcctctgccagggactaaacaagaacttaggaaattttaagattagtcagatactgtcgtctatggatagattcttatgccctaaaaacaaaacccttatacaagaagctcatgcaagactgggaaaaaccccctcctcatttgggtgattaccagaaatccaacaggtgggaaaggttaaaacatctattagtttggaactgcccctgtcctagttttaccctccttaagcagccattccaccttgttgttcngtataaacaggggtgtnggcctggaaggctgggggggccacagncaattcaaaatttntgtgggt

SEQ ID NO: 10201 - DNA, 466 bp, Homo sapiens
  III.3829 (AI569340)
gtagagaaaagatcttgctatgttgcccaggctgatcttgaactcctgggctcaagcaatcctcctccctcagccttccaaagcattgggattatagatgtgggccaccgagcttggcctgaaacccgcattttccaaacaaatgccccctcccacagaccgaccagcttccccgctcacctccagcacagggccagcacccaggatggtcctctcgacgccgctggcgtagcccttctggctgagggcggtgaggcagtggataaggaaagttggtgctctggggtcttgccggagccgctctcacccgagatcacgatgcactggttcacgcgcttcctgagcatgggggtagtaggcccacgtcggccagcgcgaaaaacgtgtggctccagcttgcccagctggctggttctcatacatcttcacgtcttggggggttggagatgggcagggacttaaaggg

SEQ ID NO: 10202 - DNA, 347 bp, Homo sapiens
  III.3830 (AI674745)
tgttttattttttttttaatgtactgccttgcaatctttaaaataactacctaggaacagaattagccaagagagagaaaccagtaattactgattaagtgaaaaacagcagcaattctagcacttctgggaataactagtggaaattatctcccagcctagtgataacagaatactgttcaggtcattgaactctggatggaatcaatgtgttccctttccttcttgctatcatctatcctaagtctggtaacataacagtccaaattttcattcaacaaaattcaagataaaacacaaggtctcttttagacatactaaagcatgaaatagcacttccatggggc

SEQ ID NO: 10203 - DNA, 230 bp, Homo sapiens
  III.3831 (AI673243)
  misc_feature (79)..(79): n is a, c, g, or t
tcagctgtggccgtgaaagggagcccccgcatgcgaacaatgacttgattttccttggagagaaactgggctacctcanttgaagtaccaccagcaattttaaggaaatcttcacctgttgctttgtaaacctcaatattacgggtccccatgtgatgttgtgcctctgagtgctaggtctcgtgctcctcacttacaaacctaaccagagcttctccgttcttcgaccc

SEQ ID NO: 10204 - DNA, 377 bp, Homo sapiens
  III.3832 (AI827500)
ttttttattgttataagtactttatttacaccaaatcaattctcaaaaatttgtgtgaggtaggtaccattgtccccatcttacagccgaggaaactgaggcacagggaggttaaggagcttgccaagctcacagagcctgtaggaggtggaagctggaattcaaatccaggccatctggtttttcagttcctgtaggaagcactgggctgtaatgtatttcctttggcagggagagtgtatttagtttggctcctgagtccttctgagatgatccttctgttgtcatcgctaacagatgatccttgtgtctggtgtggcaagatgttccagacttatgtatacattcctgccccaaactggttcaaagggtataat

SEQ ID NO: 10205 - DNA, 435 bp, Homo sapiens
  III.3833 (AI768924)
  misc_feature (383)..(383): n is a, c, g, or t
tagatgaaactgatatgtttattctatttttcaaccttttttttttaacagcctatataaaaccaccatgaaaaagtagtaaatccaacttgatatagtcttttgaaaagttccctagaatgtctaaagagtataaaatggaaatagaaggcaagatatgctcacaaacatagatctattttagtttaaaatgtgtttcttaattttaaatgctattacattacataaatccttatgtacataagtacaaccatctacaaatagacaagacagaatgattactgtcaaatgcaaacttcattaatattgattcatgcaatattctgggttttgaaatatcgttcagaaaacatttagaattttctaattctctgtttataacnaagaaaccagtaccatatatatgtaaatatgctttaaatcatttccccccaa

SEQ ID NO: 10206 - DNA, 469 bp, Homo sapiens
  III.3834 (AI805575)
ttgagacaaagagtctcgctgtgttgcccgggctggagtgcagtggcatgatctcagctcactgcaacctccacctcccaggttcaagcaattctcatgcttcagcctcccaagtagctgggactacaggcacacaccaccatgcctggctaatttttgtatttttttttttgtagagataggtctcactatgttgcccaggcaggtcttgaactcctgggctcaaccgatcctcccgcctcggcctcccaaagtgctgggattataggtgttagccaccacacctagcttactgcccactctaaaatggtcatggtatcctgtccccatcccagtattctgcatcccagtggttctcaaccttgagtgtcggtcagagtcaccatggaggcccgttaaaacatagactcttgggccttgcctctgattctgcaggtctgagggtgtggggctttgaaacaagctcctg

SEQ ID NO: 10207 - DNA, 385 bp, Homo sapiens
  III.3835 (AI913928)
tttttggagacaagggaccttaaaaattttctttgctctgtttttggagtttttccccctgtgattttagagccggagttggggaatggagcaaataaataagacctccttgctcaaagccaaggcttggggtcctcttactttgatgggaaggaagtggagatggtagaggaaccagcagtgaatacaaaagggtcactgagaacatagaggctgagtttgtggacagtgtggagtttaaattcagtttttgctaattaagcaaatttcgacaacttgtggaactgagcaggaatcctttcccctgagtcttccctcttctcccagtgggcagcatcctaaggaaggtttatatttttcaagagacgatagtaaagtctctctg

SEQ ID NO: 10208 - DNA, 304 bp, Homo sapiens
  III.3836 (AI202885)
  misc_feature (302)..(302): n is a, c, g, or t
agagactaataaagcttttaatatttaaaagttcgggcacttaattctggtgatctgggttcacgggtaacactccgtcctctgacagctggcagatggcagagtccactgaggcgctggtgatgatgatgggaactttggccttgaggctggtcagggaccagggcaggtgcacggtggtgaccagctcgtagcgagtgtgcatgatctcaccgtcctgcgtgctgctgctcacggacagcagcaacggcaggttgaaggtgctgacaacctttggtggtgttgaagcgggtcacgggggntg

SEQ ID NO: 10209 - DNA, 478 bp, Homo sapiens
  III.3837 (AI805973)
tttaatacgaatacaaaatttttattatatattatattaaaaatcaatgaacaaatattttaatgttatctaggagaaaatgaaataccttgccttgctttataaaatacaatataaagacagtgaatatcaaatcatgtcagcctctaggaaaaactgtatctaggatctaggaattgtattttaagtgtctaaagaccagcagcatcgacattactgggacttgttagaaatgcagaatctcaggtcccactccaaatctactgaataagattctacattttaacataatccccataatcttatgtgcattcctatatacaaaaagttgagaaacactgctaaagatcagtaaatgggtggaaagatcaccagctttcctttgatagtagctacatcaaatggttctaacctgtaaaacctgttttccagtctttgtttaattgtacttagatccgttggatatgccactactgtg

SEQ ID NO: 10210 - DNA, 527 bp, Homo sapiens
  III.3838 (AI420007)
ttttcagtgtttatgtattttattttgttatgaattttgcagttcccagataaaacactattttccactgactcatttttgaacgttaagtgaatgttacattcctggatacaatcccccccccaccttctatatattgttgaatccaatttgattgcattttgttaaacatttttgcatctgtgttcattcctgagagacactggactggcctgtaggtttctttctttgcaatgtctttgtctggttttggtatcagtagaatgctgacttcatagactaagttgggaagtatgtcttcctcctctgttctctgaatgagtttgtatagatttggtattactatttccttgaaagtttgatagatttcaaagtaaacctgtctggagttttttaatctttgttgttgttgttttgagaaggtttttaattataagttccatttatttgatatagtcctattctgatatttcaaaatttctttataaagtcagtttggtaatttatgcctttcaaagaatttgtct

SEQ ID NO: 10211 - DNA, 361 bp, Homo sapiens
  III.3839 (AI284133)
ttccattttaatatttttattaattaaatgtgccaaagtttctgaagcttattgatttatatgaaagtacattttttgcccatgtggcaatatgctttacataaaaatttatgtaaattataaataacatttatttattcaaataaccttaagaagttattttaatctgtggctcaaaataagttaaaggattacggtcatcaatataaaaatgtctaagcgtgaacagaaatatcactaatctatctgaaatggaaaaggaaccactgaattactttggtaatatatattcaacagtactgaattaaactttagaactactttcttttggataaagaataaagagcaaatgaaataactt

SEQ ID NO: 10212 - DNA, 476 bp, Homo sapiens
  III.3840 (AI480041)
cttcagcagtgcgggggtccttaaatgttgattcaagtcgaataaacttttctacgtctttcaacctcttaggagtcccatctatggatggggaatgggatctcttaggtgtaacagtcttagttatatttgacattccattcagatgcggttgtccctgggcagggttgtgaggtgttgtgattctaggaatgacatttcgtcctactacggtaggaatggtacacacagtggggggtgatacagtttttactgtagagtcaacttttgcgccaatcactggaatggaaagtccttgggctggtggtacactcagtggcttctccacaattacagcagcaggctcagcactattcctttctgtttctcctacagaagggctatcagacttggacgctggagaattaaaaggtgttccattatcagtgtctctggagctatccagacaactgctatccagagacaatcttttggat

SEQ ID NO: 10213 - DNA, 375 bp, Homo sapiens
  III.3841 (AI864617)
tttttttttttttaaatttccaaacctttaatcccaaatcagatcacagcgaggccagacccttcgctatctcccccaaccgcacccggagctgcagatgagttgtaaaaagtctctcccggcaagtgaatcgatccagacctgggaaatgaaggggcccccaactcccacccaagaccccctgaccttatcccccaaccccacaccccagctaccccatcaggtccccgccaggcttttctggggaccctcgtttgcaaagagcctcttcccatcccacccccaagcaacccacatacagccacagagaaaaacgtatttacagagggagaaaggataaggggacaggaggctggcgtgtaaaaaaacatgggc

SEQ ID NO: 10214 - DNA, 245 bp, Homo sapiens
  III.3842 (AI683744)
tttttttttttttttttgaaaaaaccaacctttatttcaaacctgccggaaggggggaaccttaatatttaagggctgggggccccaaaaacttattaaaaggcattcccaaccaacccaaatttataactttttaagggtccccggtaacccctcccattctggggaaaaaaaaccccgccggtccaaccaaacccccaataccgtttaagaacccaataccggcccaaggaaatttttaaaaa

SEQ ID NO: 10215 - DNA, 495 bp, Homo sapiens
  III.3843 (AI889178)
aagtgaaaataaacatgtttttattgtttcatgctaaaagacatatttggcttcacacgcttacagctgggaagaatgcatatttttggcaaagaaggctcgagtaatctctgcacgttcacacggttgacccctccctgcatgaagagcagatggtgtttcatgcacagatttctggcacagtcctcctcttgtctgatgtaaaaggtgcgagtggacctctagccccctttccccttttgcttcttctgatcagtctcgcggtaaagagcaaatttagcacttcattaaggccactaacccaagtcaagctctggactctgaaagcactgagtctaccacagaatcacagaacataaaacagaattaacatgtggatagttttttgaaaaccgatggtagaaagtggtcctgaagggagggggcttagggtcatgacttctggtgtcttctagaagaaacatgtaagtccaggaaaagaggacttgaaaaaaa

SEQ ID NO: 10216 - DNA, 348 bp, Homo sapiens
  III.3844 (AI936553)
  misc_feature (10)..(10): n is a, c, g, or t
  misc_feature (20)..(20): n is a, c, g, or t
tttcttggtngttgacttgnttactttctcccacttgtattgtaaggtttatgaggccaaggacactgtcttaattgctgttttcccaacacctaacatagggcacgatacataggttctcagcaaaagtgttttgaattaatagatgaatgatggaatcccagcttcatgactgcctgaccttgagtaagttgcttaacttcactgagcctcagttttttacctcctcctgcaatcgcgaaggatgtttgcccagaatttaaacatcatctcccaaggaatgaaatcagaataggcaaaaccgacactttcccagttttcaagggtcaggtgcagctgcaaatagaa

SEQ ID NO: 10217 - DNA, 265 bp, Homo sapiens
  III.3845 (AI695591)
ttacgaatgaggcaatttattaacccagcatggtttgttctaatgcttcttgttggcagctgccacctgtgggaaaagatggaagaataaaagttagtcaagggggtctctgctggggcactttgtaacagctacctaactacccaccacaggtgggcaccccgattttgtggtttcaaatgcatctatctcatctaattctcactggggggtattcccccatttacagaacgtacaccaggacaccaaactggactcccacatc

SEQ ID NO: 10218 - DNA, 352 bp, Homo sapiens
  III.3846 (AA459403)
tgatattacaagttctttaatgaataccttggtaacttgctgacaacttaaaagataataccactgatattcaaatacagtttataatcaagtccagtggcagatactgaaccgcccacctccacctcaatttgtgaaaacctgtcttttgtagggttggctaccatgggtaattacgcagcactgaataaaaaatagaatatttttctaatacttctacaaatataataaacacagtaacagtttgctgcagcgattttctttacaaagaatatttgggcccagtgctacagaaaaacatgaactacatcttatcgtcacaaaatagccattataaaatgaattttgcagc

SEQ ID NO: 10219 - DNA, 364 bp, Homo sapiens
  III.3847 (AA459628)
ttctaaatatatgtatatatacagtacatagaaaatagaacttttattttgtgacctaaggacgatggtgaaaagatcacgttttcaaaacaatctggtgatcagaatgttcatataccagctggtttctgaagaggtcagaatgatctttctccatactgacttttaacaatgttgatcattgaggctaaattaatatatatgaaatattcctttttgatgacaccacaaaattgttgaacagtttaagaatttcaaccttaatcttggatccctttacctcatatggaagaacttgagggacattagtatacttttttttaagatggagtcttgctctgtcacccaggttggagtgccatgg

SEQ ID NO: 10220 - DNA, 510 bp, Homo sapiens
  III.3848 (AI732818)
tgatattacaagttctttaatgaataccttggtaacttgctgacaacttaaaagataataccactgatattcaaatacagtttataatcaagtccagtggcagatactgaaccgcccacctccacctcaatttgtgaaaacctgtcttttgtagggttggctaccatgggtaattacgcagcactgaataaaaaatagaatatttttctaatacttctacaaatataataaacacagtaacagtttgctgcagcgattttctttacaaagaatatttgggcccagtgctacagaaaaacatgaactacatcttatcgtcacaaaatagccattataaaatgaattttgcagcctctgtttttttgaactttgaaataaaatgttcagacaaatattcaactttttaaaaacctccattcattgatagcctgagaaatgtacaatgaacatgtttaggcagactgctagtattttgctgtaatgacacagttaacaaagagaaaagaaaca

SEQ ID NO: 10221 - DNA, 502 bp, Homo sapiens
  III.3849 (AI734197)
ttctaaatatatgtatatatacagtacatagaaaatagaacttttattttgtgacctaaggacgatggtgaaaagatcacgttttcaaaacaatctggtgatcagaatgttcatataccagctggtttctgaagaggtcagaatgatctttctccatactgacttttaacaatgttgatcattgaggctaaattaatatatatgaaatattcctttttgatgacaccacaaaattgttgaacagtttaagaatttcaaccttaatcttggatccctttacctcatatggaagaacttgagggacattagtatacttttttttaagatggagtcttgctctgtcacccaggttggagtgccatggcatgatcttggctcactgcaacctccacctcctgggtcaagccattctgcttcagccccaagtaggtgggactccaggcatgcaccaccatgcctggctaatttttgcatttttagtagagacagggtttcaccatat

SEQ ID NO: 10222 - DNA, 492 bp, Homo sapiens
  III.3850 (AI419997)
gagagaagacctgaggcgagggtgggctgcgactggtagggagccccccagtcgtggcaatctgtgggcagcgcgcacctgtgacagggaggagctgagggatagttggccctggctgcacatccaggtgaccgtttaaaaaagcatttaggtgttggaaggagcatctgttcccacctttttggctggcctgcactcagatcctgtcctcctgaccctgagggtattgttcccagccggaaccgcccgaagatatgggagaaaggattgtgatacttgtcagtttaaccggaaggagactaaagacggaagttttccccgctcttcagggagtggaaaggaaactttactctcaaaggagtccagattctttgtcctcgagaaattcggggaaacaccttcgaagaggtggggttgaggacctcctttctgaaaacaaaagcttcctactcttctgtgtcctctggcaacgagagggatcctgatctttta

SEQ ID NO: 10223 - DNA, 538 bp, Homo sapiens
  III.3851 (AI743616)
ttttttttgtagaaggaagggctttattcagctgggagcatcagcaaactactgccttaaaatctgagctccccgagtgcacgatttctgtcccttttaagggctcacaacactaaacatttcacatgaaagggtcgtgattgatttgagcaagcaggcggtacgtgacaggctgcatgcactggcagtcagagagaaacaacacggcagggagtttcacaaatgttcttctatacaatgtctggaatctatgaataacatctgtttctaagttatgagttgatttttcactactgagtttaggccaggcaggcgcaggcctggtttcgggcctagcgccgggctgcctgtccttggttttacctccttgttgttttttcttaaaataggtactgagtataaaacaatatgagacggtctctctcttccctcattcccccctttgagactctcactttttattagtgggagttctcactcatttttgctacttatgtctttttgtgcaatagattgatagtgatttatatagtatgct

SEQ ID NO: 10224 - DNA, 479 bp, Homo sapiens
  III.3852 (R59724)
  misc_feature (202)..(202): n is a, c, g, or t
  misc_feature (320)..(320): n is a, c, g, or t
  misc_feature (329)..(329): n is a, c, g, or t
  misc_feature (350)..(350): n is a, c, g, or t
  misc_feature (390)..(390): n is a, c, g, or t
  misc_feature (419)..(419): n is a, c, g, or t
  misc_feature (436)..(436): n is a, c, g, or t
  misc_feature (443)..(443): n is a, c, g, or t
  misc_feature (453)..(453): n is a, c, g, or t
tttttttttctctgtaaaagcatttcctctgaatattttattcagaaaaaaaacacaaaaagataagacagaaacaaaaatcccagtcatctgcagtatctgtcggctttcaatttggttctcttttttaaataaagaaaaatagtaaaattaatctatgtaaaacatgccatatatattcaactgctactaaatataaaangctttaaaactgtgtgttcaattttgggttattgtattaccacaacacttatattaaaacatgtatacttttaaattggggtttccataaaaaatgggattctaatcttattaaaagntatttcccnaatattcaataaatgttgccnaggggctttttcaatccaaataggcaattttaattattcnggggatttagggggtgctctaaatttccntttaacggggtgagganggcggtntttttacagnggaaaaagttaccggggcacgggggc

SEQ ID NO: 10225 - DNA, 404 bp, Homo sapiens
  III.3853 (R59833)
  misc_feature (399)..(399): n is a, c, g, or t
aatgaagacattttctttgcagaaagaaatttcagagcttccaagaccacaaacttaaaataagtaaagaagagagtaaaattcttaaaaaggctcagaaagatggatttttgcatgaaacgcttctggacaggtagctatttacttattttcactatttttcagtagccaatagaaatggcatgtagaaaagctatattctcttaaattactgcagttttcacatttttgtctttatttataatttatgagtgtgggcaatattacctagagaggacatcatgagtttggggaaaagactgtcaaggaaagaatatctaaaaattataaccgattctaaggtatatactttaaggaaattcaggtttggactgtatcctacttccataaatttatccnttatc

SEQ ID NO: 10226 - DNA, 344 bp, Homo sapiens
  III.3854 (AI358494)
tttgaagagaattcatttttattaagaggtgaaacaaaatgtcactcatgtacaactaggctttatgggaaggtggcagagtggctgtggacacatttgcccaaagcaggctgaccccctcttccacggaagaggcatcttaaagcagtttcaccagggccctggcagggagccccagggcaggatcccacattcctatagccctcacaacaggtgccttcctgctgcttatctgcagggaggtcttcgtggggtggagatactggtggttatttgactgttacctgtggcctgtcctctgcctccttccgttgaagaaggccttgtcagccactctgtataac

SEQ ID NO: 10227 - DNA, 671 bp, Homo sapiens
  III.3855 (AI564525)
  misc_feature (300)..(300): n is a, c, g, or t
  misc_feature (438)..(438): n is a, c, g, or t
  misc_feature (457)..(457): n is a, c, g, or t
  misc_feature (559)..(559): n is a, c, g, or t
tgggattttgcaacatttaatcaaaaaagaatctggcatcttaaaagttaggtttacaaacttgacacattctcaatattagcaatttatctatttaaacattgtctaagaaaatatgatctatgaagacattaatacattaataagatacttaagagttcattataagctacaacactttgcaaataagtatccagtttaattgtaacaaaccacaatttgtgagcaaatttaagaatataaaaaacattaattagttaaatacaattctctgggaatatacattatacctacagctgnttttacagtgagagtcttcctttttttttccttttaattatcaaaatggtaaatcactgtatggtcctggatctccatgctataaaactgaaatatgtatttccagcgtagcagatggtgaccaggaaggcaaagaancgatgaggccgccagctgntgaagttgtgactgtccctctcaggggagacggaagatgcatctacaacagcggcagagaggtacaagacgaaggcactgccgttaagcacaggcccactgntgtccaggcaccctgggaaatcctggtgtggtcatttgtatgtagataatggagaagaagaagtgagggaccagtaaaatacagctaccaacatgacccagccaaatgcggg

SEQ ID NO: 10228 - DNA, 686 bp, Homo sapiens
  III.3856 (AI591203)
  misc_feature (253)..(253): n is a, c, g, or t
  misc_feature (262)..(262): n is a, c, g, or t
  misc_feature (374)..(374): n is a, c, g, or t
  misc_feature (500)..(500): n is a, c, g, or t
  misc_feature (623)..(623): n is a, c, g, or t
tttttttttttgagacagagtctcgctctgtcacccaggctggagtgcaggggcgtgatcctggctcaccgcaacctctgcctctcagggtcaagcagttctcttgcctcagcctcccaaggagcagggattacaggcaagcgccaacacgcccagctaattttttgtttgtttgtttgttttagcagagacagagtttccctatgttggccagtctggtctcgaacttctggtctcaagtgattctgtccgncttggcctnccaaagtgctgggattacaggcatgagccaccacgcctggccaatatccatcattaagggttaagttaaaatagcttataatagtcataggatttagatttgctatttgcangtaaatctaaaaaatgatgtatcaaatgttacaaatattcaaaagataaaaactaagaaaacagtttatataaactaataattacatacagggtatttcagctctttctggatactcttacctctngagattttctccccaataacaaatatggtagctggggattcatcgatttcatcttactaaagagatcttgaatttcttcttgtgaatatcccatttccacccatatatctattcttttttgtnctgggatgctagctctggggtcacaaatgggttgagtcatcttcttcatgccctgcattgatc

SEQ ID NO: 10229 - DNA, 209 bp, Homo sapiens
  III.3857 (AI673286)
ttttttttttttttttttttttaaccccaaataaaaaccttaatggaaaaaaaccaaacccaaccaaaaggctttcaaaggcttttaaaaaaaatttaaagggcctttttactaaggttaaggccaaccccaaaaaaggcgaattgcctggttaaccaaaatgggtggatttaatccagccctaatttttttaagcccccaggtttttt

SEQ ID NO: 10230 - DNA, 358 bp, Homo sapiens
  III.3858 (AA682947)
ttcgacacttttaaaatgatgcactttattcctggcaatgtgctttgttctgaaatctactttggtactaatgtaaccactccagacttgttttgattcctgttggcatgatgtatctttccccatccattttctttcaacctatttgtgctttatatttcaagggtgtttcttgttggaagcaaaaatgttgtcttttattcaacctacttgtgccacctgtttttgttacattctggtcaaaatggagttaacaaggactggatttaccttcctgcctgaaacaaccaaaatatgaataaaatatatgaaacaaatatgcacggagatagaagcgagataacaaagacatttattt

SEQ ID NO: 10231 - DNA, 210 bp, Homo sapiens
  III.3859 (AI696450)
gacatagtcttaactctgttgccaggctggagtgcaatggcacaatctcggctcactgcaacctccgcctcatggtttcaggttgattctcccgcctcagccttccaagtagctgagattacaggcgcccgccactacgcccagctaatttttgtattttagtagagatgggggtttaccatgtttggtcaagctggtctcaactccaac

SEQ ID NO: 10232 - DNA, 411 bp, Homo sapiens
  III.3860 (H17493)
  misc_feature (36)..(36): n is a, c, g, or t
  misc_feature (334)..(334): n is a, c, g, or t
  misc_feature (344)..(344): n is a, c, g, or t
  misc_feature (360)..(360): n is a, c, g, or t
  misc_feature (370)..(370): n is a, c, g, or t
  misc_feature (379)..(379): n is a, c, g, or t
  misc_feature (388)..(388): n is a, c, g, or t
tttttttttttttccagcaaaagataatcccaaagncaaatttgtgctagggttctttgaacttggctcttttacctcatggttgaagatcttgaaagaagtatgtaggataccactgggtgatgtacttgtcaaggccctgaaaagtagcctaccatgccattctcccccactctcaagtagcacttttatgttatgggaatcaaggggtgggaggtatcattattcctgggtagttatgggtttttaataaatatcattactgcaatatcagacttcaatcttgccagaacttcaaaaaacattattcaatttttgtcttacggaaacactnaaaaaaaagnctatcactgtgagganttttctttgncaatttccngttaaatgngaaacatttgtttaaaaagttcc

SEQ ID NO: 10233 - DNA, 385 bp, Homo sapiens
  III.3861 (H17600)
  misc_feature (317)..(317): n is a, c, g, or t
  misc_feature (329)..(329): n is a, c, g, or t
  misc_feature (357)..(357): n is a, c, g, or t
  misc_feature (380)..(380): n is a, c, g, or t
aattcttcaatttgaaatcaccttttctaaaaagtcaattcatctagttaagtcgctgaacaattacctgccaaatgctatactgtgtcatggtgatgcaagtcactaaatttctcagtttttgctgattgctaagggaaataacagtatttccacaatagggttcaaattcctgcaaaattacctaccccagttcatctctgctgaacatttggaaaccatgcactagccaacccaactgacttctgctaggtagaggcatttgtcttagagagagagagagcgcgggagagagtgagagagagtgagagcacaangataacgcaggngagagagagagaaagtatgaggaaaggnaaggaatgcaagaggagggagangttat

SEQ ID NO: 10234 - DNA, 544 bp, Homo sapiens
  III.3862 (AI651520)
tttgcagtgggatttaacaacctttcttttagctattgtgaaatatataatacattgctattaactatagtcaccatgctgtgtaatagatcaacagaacttattcctcctgtctaactaaaactttttaacctgtgaccaacaacttcctctttcccatttacccatcctccccctccccagttcaagcctctggtaatcagcattctcttctacgtcaatgaatttgtctttttaagattccacacataagtgagatcattagctatttgtctttctgtgtctggtttatttcatttagcataaggtcctctaggttcatccatgttgcaaatggcagaatttcctacatctttaaggctgaatagtattgcactgtgtttatataccatgttttaaaaatccatttgtctgttgatgggcacttcagttgtttggatatcttggctatataatgctggaatgaacataggagtgcagacatctcttcaacatgctgatttaaatttctttgaatatatacccagaagaggaattgctggat

SEQ ID NO: 10235 - DNA, 185 bp, Homo sapiens
  III.3863 (AI801654)
gcagctttgtgactgtttattaattggtttaatatatattcattaacaaaattaatattcattaacaattataaacaaaaattaataaacatataaaactttcatgctgtacatgctaaaacattttaaggcatcttttgtctggaatatgttttagcatgtacagcatgaaagttttatatgtt

SEQ ID NO: 10236 - DNA, 526 bp, Homo sapiens
  III.3864 (AI693728)
tttgggccatttttctctttattcctactaagtgcaactgttcctcgcacttaataggtgagcagtagtagtaaatccttattgaatttaatacatatctttgagaatcattgttcaggcttgatatccaaaggagaaatgaaaatgccaaccaaggtgaacttacatggtttaattccttttgtgtccctacaccaccttccagtcccatcccataagctaaacacctatacacaacaacccagggcagcttagaaatcttcactgagacaagggagggatttattctcccaacatttagaacatgacacagaggacctgggttcaaatcctgaaccaaccatttactagcagccacattatggaatgttgctaaattatggaatacctgatgtatgccctccttcaacaaaccttgcaggggctccagagaaacatgtactgttcaaggcactggagatgaagcagacagcaaaacatttcccagatgccaagctgattgcagagtatatcagtatagtcgaga

SEQ ID NO: 10237 - DNA, 548 bp, Homo sapiens
  III.3865 (AI743303)
ggaatttttttttttttttttttgaaatttccaaattgcttctttttcaactttttattttgaaaaatttcaaacccacagaaaagtttcaagaattgtgcaatgaacaccccatatagccttcacttagattcatctcatcaattaatgtttcatcaaatatgttctctctctctctctctctctgtctctctccatgtgtgtaccccactgaaaatctttttgcagaactatttgggagttttagacagctttgccccctattgggctcatactaatttcagctcagaacatgaacattaacttacataaccaatatatattaaattcatgaaatttaacattgatgtcccaataataccagttatttttcagtcacttttttacagtcatgtttcctactaatctaaaatccaatccaagatcacacactgcatttagtttccaagtctcctgagtttgaaatagttcctcagcctctctttgactttaatgaatatttttgaagagtacagaacacttatgagtggaatgtgttgaatttgggt

SEQ ID NO: 10238 - DNA, 265 bp, Homo sapiens
  III.3866 (R52705)
  misc_feature (42)..(42): n is a, c, g, or t
tttttttttgaaaattttatttttctttttattgcaaatttnttgtttttgaaagaacatggaagctgattctcatttgagctttggtgagaagagaactgcactgtggctcgacagctcaccacctcggctgcacacccaaacacgcggaggcctcgggcacgcactgatgcctgcgacccacctcccagaggttctgacttaatcggtctgggaggcacagcggggcatcagtagatttcccaactcctctgggatgatttca

SEQ ID NO: 10239 - DNA, 381 bp, Homo sapiens
  III.3867 (R52758)
  misc_feature (3)..(3): n is a, c, g, or t
  misc_feature (363)..(363): n is a, c, g, or t
  misc_feature (377)..(377): n is a, c, g, or t
tangggtttatatacacttatcgtaactgtatttttgtgccttggttttatcatgtcaatgcactgtactctgtaaaagttttgcagacaaaatagaaagtatgataatccgtcagaagtatgatgtaaaactggaatcctctgtattttttaaatgttctaaaaattttatcgctgttaaggtattaatcattcagtattactaatggaatagaaattcatacttttgtatggacaacaattcaaattgatattgcatttatagcactgtaggaaactttcatcttgagccaactttgtaggatgatggggtgtttttattttccaatcgcccatatttggatccagtccattggaaaattnggccccccggggcnggtt

SEQ ID NO: 10240 - DNA, 450 bp, Homo sapiens
  III.3868 (AI655011)
taattggattttcaaattatttattcctcaaaatgaacatcaaaagtgtacaacccccaaagtaacccaagaaacagaacaactccttggctgcttctcctccatcccagtttcgggccaatctcttcatcctctaatatcaaaatgtatctgatggtgcaaaatccttctaagaaatattggtcaaatttccaaatccttataccaaattttggatggtgcagtcacagtaagctgccagcagagaaggtatggtccaaaaaattatcccagtctctttgcatttctcctcctgaccctttcttctcaccttttcttagctttccctctcatctttcttctttcctctctgacactgacagccattcaggcttcttggtgcagccagcatcagatggtgtcctctcactgcttctttggaagtctgtgtagtatcttcctgctttgagg

SEQ ID NO: 10241 - DNA, 310 bp, Homo sapiens
  III.3869 (AA736680)
tttttttttttttttttttttttaatttcaacttttattttagattcaggggatggggtacatgtgcaggtttgttacatgggtataccgtgatgctgaggctttatgattcagcctgtcacccagggagtgagcataatacctaataggtagttttcaaccctcactcctccctcactcccctcccttgtagtccccagtgtctgttattcccgtctccgtccatgtgtaccaatgtttagctcccatttatacctgcttttcttcttatgtattaaagttctacccattctctgagtaaggtcctatc

SEQ ID NO: 10242 - DNA, 549 bp, Homo sapiens
  III.3870 (AI656894)
ctcagaaaatgtttctttaatttagtttaactaaaatttcatcaaggtagaatgcagttttgtaaaaagttccaaggatcctattacacagttgctaattaaccttcagttccttatttatacattttttacttacagatataaaaggaaaaaaaatcctagaaattattttaaacagaacattatacaattaattaaaagtaggaattagagtggaacaatgtggctttagatactgataattaatagacaggatgaatcacaaaatatattaagtattatcattttccagtctctgcatctcatcttgtcccatctgtccaaggtgagacaaaagtttgctataggcttccctttgtgctatattcctgccaaggccccatttctgctctgaatccttcagagactgagtaagggtagaaatcaagtggatgacaacctgctggtccaatgttgctactgtttctaaaatgctgtaaacctggtaatagtacctcataccataatcctggataaactgcctaaacacagaagtcagctgggaggaag

SEQ ID NO: 10243 - DNA, 534 bp, Homo sapiens
  III.3871 (AI807169)
caaatttcccaagtcaatttctgtaatgaatctgccctttagacctggcatgcacccaggttatgtgtcctgatgtggggcttcacaaacatggtctctgtacatttacagcacctggccagcctgtgaccctcagtggcccttgctggcagctgcactgaaatgctgtattagaggcctctggatcctgtatgttctatgcaaggttctcacgggtcctccctccagaaatgccctcgactgggcagaatggaaggagccccaggtggcagagggcagggtgctggcagaattgggaacacctggagaggacataaggtggggttggagtccttttctgccttcacgtggttatccactcgctctcttcccatagagcctgtcttccaccgtgacccttgaacactcttcactccctcctggggtccacatttcttacgaatcccagtgtgagggtcctgagaagagggagggtaaggctgaggatcgaggacagtgcaaccacgtccgaatcaaccagacggtgagagccag

SEQ ID NO: 10244 - DNA, 337 bp, Homo sapiens
  III.3872 (AI886200)
  misc_feature (291)..(291): n is a, c, g, or t
ctctcaacctccatttatttattctcttattattatttttagttgacacataaaaattgtacatatttatggagcacagtgtgatattttgctacctgtatacaatgtgttgtgatcaaatcaaagtcattaacatatccatcacctcaaacatttatcatttctttgtgttggaaacattcaaaatactctattctagctatttgaaaatatagaacaaacaattgttaactatagtctccctacaaagctacagaacactagaacttattcctcctattggcagtatanttgtgtttattaaccaactctccgtatcctcctttccctccactca

SEQ ID NO: 10245 - DNA, 440 bp, Homo sapiens
  III.3873 (AI655070)
aattataatttttatttattgttgtgtaacaaactacctccaaaattaaatagcttaaaatgacatttgctttctcacagtttcctcagagggtcatgaacctggctgaggcttagctgtgccctctgtttcaggttgtctcacatggctgcaaccaaggtatctgcttaggctgcggtctcatctgaaggttcagctgatgatagatctgctttcaagctcactgcttggctgctggcaagattcagtgtcttgtagactgttgactgagggcctcagttccttctagcttttagtgagagagcatcctcagttcctttccatgcaggtctccacatatggcacattccttcatcagagtgagtaagcagagagagagagagaaaaggtgcaggaaggtggtgtcatggcttttaaaatctaacctcagagtgcattcc

SEQ ID NO: 10246 - DNA, 466 bp, Homo sapiens
  III.3874 (AI693470)
aactttattttcatgactaataaaaaatactgatgaattgaactgatgtctgagagacattgacacattctctgatttttcttttgtggttatgtaggtgagacaggcattggcaaatccacgttaatggacactttgttcaacaccaaatttgaaagtgacccagctactcacaatgaaccaggtgttcggttaaaagccagaagttatgagcttcaggaaagcaatgtacggctgaagttaaccattgttgacaccgtgggatttggagaccagataaataaagatgacaggtacatcttgggattttggggggacatgaatggatgaggagatagcaggatccatcccaggtaaatttaaaggccaaatgttttggggattttttagttgtggggcttggtcctctattgcctaaaaggtgtgatattcttgtcctctgagaatatttctgagaatattcttc

SEQ ID NO: 10247 - DNA, 333 bp, Homo sapiens
  III.3875 (AI500333)
ctgctgtcaccccggccgcgccccccaactttctgcacagtcgcggagctggaagtttccgggcttcgcggacacgctgggctgggtttcagtcgcggctccgaggttggcaacaaagagggaaaggaggaggaaaagcaggccggggaggggaggaagagaaccgcgcggaggccgcggcgccgagagccccagaacttccaattctacccagaagcttttttcgtcgtgtttttctcttaggtaaacaagcaagttccacgccccagtcctgctggggccttcgccagccaccgctctgggctcatctcccggcgcctcctcggggcacct

SEQ ID NO: 10248 - DNA, 434 bp, Homo sapiens
  III.3876 (AI610811)
aactgcatcatggaggtgtcctgtggccaggcggaaagcagcgagaagccgaacgtcgagggcatgacgtccaaagattactactttgactcctacgcccacttcggcaactccatgtttcacaaccgccacctctttaaagacaaggtggtgctggatgtgggctcggacacaagcatcctctgcatgttcgccgccaaggccgggcccgcaaggtcatcggcatcgagtgttccagtagctctgattatgcggtgaagattgtcaaagccaacaagttagaccacttggtgaccatcaccaaggggaaggtggaggagatagagctcccggtggaaaaggtgaacatcatcatcagcaagtggatgggctaactgcctcttctacgagtccatgctcaacactgtgctctatgcccggacaagtggctggcg

SEQ ID NO: 10249 - DNA, 397 bp, Homo sapiens
  III.3877 (AI927115)
aaaattaaccaataaagtgcatgttccttacatattacacctgccccttttacaaacatttcttctagaaagtcacatgtgtaggctcagaatcacatggtattatagaaggggttggttgtccgttttttgtcatttgcctttttcagtctcctaagggggtgagttctgccgtgttgctgacggggtgccacggccagccctggagctgggcatgcacactgcagtccctgggtctgtagcacgggaaggcctccttcagaactagtcaattcaagtcctgccctggggagcaaatactgctgactagaaccaaattctttggcatactgcacaaggggcctctccactggcttgctctgcacaatacactctgttgttgtgagttgttctacaa

SEQ ID NO: 10250 - DNA, 390 bp, Homo sapiens
  III.3878 (AI671154)
cagtgttccggtttattatctgagggacaaacattcagactagaggaggagtgttctgaaatcctgtgtgaggtacaatcattcagaccgcagcagcagtgttctggaatcatatgtggggggcaatcattcagacgacagctggggtgttctagaatcctatgtgtgggacaggcattcagaccctcgtagcattgttctggaatccagagatttattcattgtttgctgatcgtgaaaatgcacagagcactctggaagcatagctgtgataacagtcgaatggagtgggttaaggagagaactgatgtggcttggtcctagattctcctgcccaaaatgttctacacaatagctggaaaagactgcagggacaaagacccgaacccc

SEQ ID NO: 10251 - DNA, 456 bp, Homo sapiens
  III.3879 (AI693006)
ttagtcagccaatatttattgaatgcctgctgtatggcaggcgctgtcctaggcacttactttttggttatctacctgtatgtatcaaaccactctaaaatgcagtggcttaaaatggacaacaaacatttattatctcttataactttataagttggctgagcagttcttccactgatctcaccaagggacttttatgctgctgcagccagatggcagctggaactgaagtcatctgggagctagactgggctggctgagtcaagatggtggcctcacatgtcaggtaccctggaaagaacctggagggctgggctaggctgggactggtgcattgatgggattccttctctcctgctgtcctgtatgggctcctccttctccatgtggcccttccacatctcctcttcatgcgcatttctccaagagggtatccagacttcttacatcacagct

SEQ ID NO: 10252 - DNA, 485 bp, Homo sapiens
  III.3880 (AI696892)
gagatggagtcttactctgtcgccaggctggagtgccgtggcgcaatctcggctcactgcaacctgcgcctcctgggctccagcgggtcccctgcctcagcctcccaagtagctgggaccacagtgcgcaccaccacgcccggctattttttgtattttattagagacggagtttcaccatgttggccaggctagtctcgttctcctgacctcgtgatctgcccacttcggcctccccaaagtgctgggattacaggcgtgagccactgcgcctggccccttcttttctactttagataatggtgtgataactacagacagctgattgtcaaatttttagtaattctgtgatgtagttgttaagcacagccattaacaattaaatttatatactttaaattaactatgttaaagacaaggcaatagatactcaaatttattacttcctaaatatttcactgtgttgtattatgcgtgctcttggg

SEQ ID NO: 10253 - DNA, 231 bp, Homo sapiens
  III.3881 (AI499621)
ttttttttttttttttttttttttttttttttttttttttttttttttttttttttttttttttttttttttctttaaaaaattttttggggtcttttaaaggcccccccctaggggttccccccctttttgggaaaaaaacgggaaaaaatttgccccccattttcccccttttttttttggggggggggaaggaaaatttttaaaaaaaaaaacccccaaaaacccggg

SEQ ID NO: 10254 - DNA, 471 bp, Homo sapiens
  III.3882 (AI761124)
aaaaaaaggacagattggaaagagaaagacaaatagaattgcatcactaatgatgtcattattgcctggaaaggaacgaagggaaggccattttgtccatttctggaggcgtctttgagaagggttctttggctaaagaaaggaacagtttcaccttcctttccaatttggtaaggacatctctggcctgctcaagtttgaagcttccccatcagaagtctgtaaaacacaccagaaggaaaagacacagacagggaatgaagcctgcaaagtccctggggctggaatgtcttgtggccaagtcactcctgctggcgctgtggagtcccaggctggcctgcagaaggaacccttacctctcctcaattctctctgctagttgagagcaccgagccatttccttctttccattttctgtcctagggtctacttgacaggccaaacaagagtggtgtcccacaccccaccctg

SEQ ID NO: 10255 - DNA, 387 bp, Homo sapiens
  III.3883 (AI559344)
aaataaagaaatttcttttttccctgggtttagttgagaatttttttcaaaaaacatgagaaaccccagaaaaaaaatgattttctttcacgaagttccaaacaggtttctctcctgttccccagccttgccttcatgatgcaggcccaattgcacccttgcagacaacagtctggcctgaaccctattgatgcaactttgcgcaatcaagatggggctccagtgggtcaccaggcagccctgatggactgatggaataaataggatcgggggctctgagggaatgagaccctagagggtacactccccatcccccagggaagtgactgtacccagaggctggtagtacccaggggtggggtgataattatttctctagtacctgaa

SEQ ID NO: 10256 - DNA, 457 bp, Homo sapiens
  III.3884 (AI424998)
  misc_feature (333)..(333): n is a, c, g, or t
  misc_feature (443)..(443): n is a, c, g, or t
tttggcactgaaaatagatttaatgtagtcgagagcaggcaccaactatgcggcaggagttacgaaactctgtccccagaaatattctctaagtggggaggtggcaagttcaaaaagaaacaaatgataacagccttctcaaagctctgaaagcagcgctctcacactgggcaaaggcggacctcacctcaatgccctgtagcaggggacccctaagcacgcagaggctgggtctcactcagcaggtgggtgtctcagtccgcaggtgcagcggagccagtggcctttggtcctacagctcagcagaactctgactcccagctcccatgccancccagtggccaaggaaaagctggaaagatgcacgggtcactctctccagctcccacctccttctcctgagaaataaaatccacagccagctccagtctgcctccaacggngcaggtgttcttgg

SEQ ID NO: 10257 - DNA, 583 bp, Homo sapiens
  III.3885 (AI887943)
  misc_feature (381)..(381): n is a, c, g, or t
  misc_feature (562)..(562): n is a, c, g, or t
aaaataattaacactgtgttgattttcttatacataaatcttgttctatatttctttagctagagtccaaggagtgggatcactgggttaaattgtgtgaatgttgttgaagaccttgatttaaaaatgtccagccccctcccctataaatcttatacatttcaatctcataaatacccaccactaatgtattaaggagcctgtgttactacactcacaaccattcaatattaccatttcgttaaatttgccaacttgatagataaaaatagtaacttttatttagctattagtgaagtagaatatatatgtttccttggcaaattttactctatcttttgtcaattgtctatttgtgtccttaacttattttttcattanggtgtctgtgttatttgtatccttagcttattttctcattagggtgtctgtgtttttcttactaatttgaaggaattttttttacattaggtgtactaatcctaagttactgtttcttaagttagttgaaaatatgttttccatgtgattttaagttttaattttagtgtgtgatatattntatacacaaagttttttacaa

SEQ ID NO: 10258 - DNA, 412 bp, Homo sapiens
  III.3886 (AI677654)
ttgatttaaacaaaaatatttactcttttcattagcaaaacattatttaaaatatatctatttctcccctctgaacatttaactaggaacactgggcaatttttgaaggtttagtgctgattgtttaatacaataaatatggctgtggagagcacacagcagcagtagcttacatacgtccacggataagaaatttactctcatctggttagtgtccagtccaccaaaggaaaggtttggcattcgtgtgcttttttttcgtgtaggaatcaattctgcttgattttcattcttggaagaaaaaataatcagctgatatcctcaaattttatgacatgatgcaaaggagcaaggggacaaagatgacctatggtcaaaaagctggactgggatcaggtctccaggcagatct

SEQ ID NO: 10259 - DNA, 440 bp, Homo sapiens
  III.3887 (AI825650)
ctttcctttgttttttcctcctggctttcctctattcctttccttattctttatctctttcatctttcttccctttctatgtctctttctctctttctttatacttctttctctagatttttaaaattctgtctctctctgtttctcatttccttcctcacttcctccctcgctgctcctttccctccctccttcccttcctctgtctgtctcttttctccatttcctttctccctcccttcctctgtctgtctttgtctggattctagaagactctcctcattctgtatctccctgtgtcctaaccgatccgcgaccaagtcccgtttcttctttctccttctgagatgcatcttcaaactcccacgtgccacaagttgtcttttgactctgttgcagcctatgcagagacacgttggggaacggtttctgtgaagttg

SEQ ID NO: 10260 - DNA, 475 bp, Homo sapiens
  III.3888 (AA576740)
aatgtttatagaagctttatttgtaattgtcaagaaaaattggaaacaacacaaataaggtgggatttgagagactgaagacaatggaaagaccagggagtctatatgagtggagagggaatggtgaagagcttgtccacgaatcgggagaggagttggacgagttgcatggtccctccttctccactttcccctccctgtatgcatttatccctgatgtggaagggagtcaggtgtgctaagccaaggaagagtctgaagaagaaatggaagaaaaaagagaagacaggcaggcaacttccagttccatcaagggggcaaccatggagcaggacagctgctcctaaactcagaggggcagcaggaaaacccctgcattttgcttttaataatatttggattatttaattttttaaaagtcaaagaagttttaaaattctaatgaaatactgaaaagctaattttaaaaagtatt

SEQ ID NO: 10261 - DNA, 422 bp, Homo sapiens
  III.3889 (AI912410)
ttttttttttcattctcaaatagttcagggtttaattgagcaaacaaggtacacataattgcagagttgattaaagatcaaaatgatcgatttagataattcatggactcctgcattccatggggttagatttaaaccctccatctcacagtaaattcagatactgccgaagccaacagcaatgtttccacctttgttcatgcctcccaaagcccctcagaaaacgcctatatagcccaccagtatctcacaggggccaccttctcctgtgctgggccctggtgtcccctgccagaagacacactaaactcttcctgatttgttttttgcttgctgctgccaggaagttcaactgtctgtcattctcaaatctcccctccttaagttaaaggagaccaaatctagccattacccccaatagt

SEQ ID NO: 10262 - DNA, 407 bp, Homo sapiens
  III.3890 (AI364918)
tccccggcatctgccctgccccagctgagccccttccttctgcttccctaaatgccacgtcagtgggaacatgctggggcgggaacgcagaatgtccctttctcaggaaacgcctgaccaggccaggcccatgggtcagaccttggtgcgaatgacattcttgtcggaatcgatgtcggtcaatgtgtcgtagtcatcctcctccacagagctcatggagtccactcggggccgagtacctacaggttcaaaggagcggccctggtaaccgtaagagaggtccccagtgccagcgctgtcaaccagaccatcggtagatccagaaacattctcaaaggagccatagttgtaaccctcataaggggaactgccaggaaaagaatcagccaggactcgagggtgaccgc

SEQ ID NO: 10263 - DNA, 534 bp, Homo sapiens
  III.3891 (AI830571)
cttgttcaatctttattagaggaaaggctgacctctgtatgggcaagaaccaagcaggaagatcatgggagcactcagcctaccctctgtggtcataaacaatctagctagagtccctgttttatatatcctagtaagaaaaacagaaaccctgaagtcaaacagcatattcctctatattctgattatgccctactttctacccctaaggaatttaacaaatcattacttccaaccccacacagaatcctccctgagagaagagctggttaatatatttttccagggatgtgttagcctactattgacatgttagtgcccttatagtttagtcctccaagcaattgtccagttgttttgtgtttaatctgaccctgctgacagtcattactcaaaatgaagaaggcaatctagagagaaactgtagctgatgctcctcttctctcagtgggtggacagcccatccataaagtcttcttgatgatggtgtccaggagccaggatccaaggagctcaacaacagcagtgggaaga

SEQ ID NO: 10264 - DNA, 410 bp, Homo sapiens
  III.3892 (AI926847)
gagacattgcattctgttgccaggctggagtgcaatggtgcaatctcggctcactgcaacctctgccttcctggttcaagtgattctcctgcctcagcctcctgggtagctgggattacaggagtgtgccaccacggtcagctaatttttgtatttttagtagagacagcgtttcaccatgttggtcaggctggtctcgaactctccacctcaggtgatccgcctgtctcagcctcccaaagtgctgggattacaggcgtgagccacagtgccaggcagtaacgagctttttaattttctccccacatgatacttattgatgacagaggagaaaaagtatattgtagaaacctcgctcataccaccttaaccaaggaatcaaggcagtatcaccattaaccgaatgaaat

SEQ ID NO: 10265 - DNA, 295 bp, Homo sapiens
  III.3893 (AI656470)
gcacttattcatatagtacttaacagctaaaataagggtgtattaacttactcagagtcactaaataatggagggaaaggaaaagaggctaatccgtagagactgaactggttatcaaccttcctaacatctgtctggccgcacctgggcaaacttgtctctaaggggaatgaggcccaaagtgatttttgcactgagctcctcctgccctaccaggtgccaaggcatgagattagaagagagcaaccagttattaaactgtcaaattggaaaaatgattaaaagctaaagattc

SEQ ID NO: 10266 - DNA, 223 bp, Homo sapiens
  III.3894 (AI569579)
tttttttttttttttttttttttttttttttttttttttttttttttttttttttttttttcttttttttttttttttttttttttttttttttttttttccccaaaaaaacctttaaagggggccaaaaaaatggggcaaaaatttggggggggggggtcccccaaaaaagggccggttttaaaaaaacaaaacctaaaaccccccccccccaaaaaaaaaa

SEQ ID NO: 10267 - DNA, 561 bp, Homo sapiens
  III.3895 (AI344125)
gttaattctctcctttaatcctgatcacaactctctggggaaaggaggaggcttgcaggagacaggtttgagctcaggacagtctcctggtatgagattatgagtttaactcttgaaatccagagctcttactcttctgatgccagaatgtctgcccctcatctctcaaataagatccacagacagaaatctacttttcattttctttccctgatagctggaggtgctgatgtgacttggaagggtcctgctaaatttcaccagctttatggcctccatccaagtgacccctttagtccacgtaaagggaaagtccaagtgcctggagggatgatgtgggcatagggcttttcatttcttggagaccccatacatttgactgataagggtgatgtggtttggcaatttaccttgtgagagtaacatgagtcatcatcaattggaaagtcctactgtctccattgccaaggttccatgttggtttcctttaactctgctccaggctgtgtagcatctataggcatggccagtcattcaccttgccctgacacaatgtagctg

SEQ ID NO: 10268 - DNA, 438 bp, Homo sapiens
  III.3896 (AI684820)
tttaagacttgtgactttattgcattgttgtgacaccagatgctattgtttgggtgtcccctcctgtctcccacaaatccacttccgtatgtctgaaaatccgtaatacgtctaatgattatcaagcaagggaggtctcaggaatattgtaccttgagaagtataagaacttcccagaggttatgttaccataaaatatctagtttctagtgcttaaaacattaaattgtttgcaacatatttttccgtacgttaatcaacatactttgcgatcccttattaagttctagcctctgcaacaaacgtgaaaaaaagcaaagacgcacaactcaaatgtgagaagcacggaaatttcctagaccgcagggttcgttctcagtagtcggcaataagctggctttcagagtcaggaacttgataaagttgttttggaggatg

SEQ ID NO: 10269 - DNA, 518 bp, Homo sapiens
  III.3897 (AI934986)
ttttaatcataattatcagggatttttattgcaaaattaatctttgtgattaaaatcacagcattaattcattctaaaacttttctttgtaactatagcatttaaaaaaaaaaactgattgtcggtgaggatgtagagaaattggaagcttttcgtactttgctggtgggaatgtaaaatgctgcaggtgttttaggaaacagtctggcaagtcttcaaatattaaacgtagatttatatatgtcccagcaatgctctggctgaagtcaggtccagtttgggaataagcacttttgattgttgtgcctagaacagagcaaaggatgcatgatgctggtgttcagaatgaggagcatgaattggatgaggaagaatttgtcagaaattaggtttatcagtatgatccaatattacagaagtcccagggttaacatatacagtcagctggcctttgacaatggcgccaagaatcaccatggaggtaagaatagtctaacaaatgatgctggaaaaaccat

SEQ ID NO: 10270 - DNA, 183 bp, Homo sapiens
  III.3898 (AI587121)
tttttttttttttttttttttttttttttttttttttttttttttttttttttttttttttttttttaaaaattttttttaaaaacccctgggggcaattttaaaaagcattcccccccgtgggggccccattcaacaaaaaaaaaaggggggggggaaaaagggcccggggacccccacccc

SEQ ID NO: 10271 - DNA, 342 bp, Homo sapiens
  III.3899 (AI522199)
tacatggaaattcatatcttttttattggataagaagactcaatgcaataaagacatacattttttcctgaattagtctgtatattcagtatgatctcaatgtgggatatattttaccttggacaaaaagagtgattctaaagtttatccagaagaataaacatcttacaaccaccagaaaaactctgaaaaagagtggcattgagaaacttgtcttgctgagtattaaaaatgtataagatgatgacagttcagtaaagcagtgtggtttgaaaaaggaatcaaaagatagctcaaagagatgaactgagattataggaagggacacaagtacgcagatat

SEQ ID NO: 10272 - DNA, 459 bp, Homo sapiens
  III.3900 (AI769622)
ttgcaatttttaaacattgtattttatttattcaaacatattttcaaaaacagaacaaatgttctaaaaacaagctgcaagtggataaaatagataacatacaagaaacattatcaagttttttgaatgacactaataaattaatttgtgatgttacattttggaacttcctgtcttgaattgctgtgttcatttcacaaattaaactttaaatctcataattaatacatgaaaacttttgtgaaaagttaaacattgcagaattatatagaataaaaatttaaattctcatccttgtaattacatgtatttttcaagattctttcttctttgtaacagtttacatatactttatttcattgaaaaaatacgtttttttgtttttctggaaactactttttctgtttagcaatgtgataatgaacctgttctctgcaatggctaccctcatacatttgt

SEQ ID NO: 10273 - DNA, 451 bp, Homo sapiens
  III.3901 (AI652698)
  misc_feature (213)..(213): n is a, c, g, or t
tttcttataaagttaacctttgttgaaaaccaccaataaatatcacttacattagggaggcaccatggtaaaattaatgtctacttcttatatttaaaaatgcagggataatatttctgttgcacctttgtatcaatagtcaactgtagtgactgtctttctggccacagcagaagaaaaactgagggagataaagtcaaaaaggaaaagcangaggcatgagcttggtgcaagacatgtgaaactaccttgaaaacatttcctattctcttgtttacaaaaaaacaggcaggtcacatcacaccattaatgcttcctttccttattttacatactgtagtcactccttattttaaccttgaggctgattaaaaaaagattttaggagaagggtaaagaactaaacttcaacatgcctttaaaaacaaaacaaataaacctgacaggttca

SEQ ID NO: 10274 - DNA, 381 bp, Homo sapiens
  III.3902 (AI675655)
tatttttataagtaactttattttccccaagtccacctagaaatgatctgtaagtcaaaacacaaggaaattaaccacttttagctaccctgaggacacctttccataggtgaccctgaagtatgcaaccatttaaccatgaagggataccacattccacttcaggaacattatcctgttcatcctcagagttgttttctaccagtgcctcagttctttctgattgcttgagctgccccagagccagaggtgcactgtagaaagcccaccttgggctcagttccgggaaagaaagaattgttctagatgtacataatggactatggtacaaaccaacccctagagagacaactcctagaaccttacaagtaatggctgtac

SEQ ID NO: 10275 - DNA, 352 bp, Homo sapiens
  III.3903 (H53792)
  misc_feature (211)..(211): n is a, c, g, or t
  misc_feature (328)..(328): n is a, c, g, or t
tatttatttatttttgggacggagtttcggtcttgtcgtccaggctggagtgcaatagctcaatctcggctcactgcaacccccgcctcctgggttcgagcgattctcctgcctcagcctcctgagtagctgggattacaggcacccgccatgatgcccgactaatttttgtcttcttagtagagacagggtttcaccatgttggccaggntagtctcgaactcctgacctcaggtgatccacccacctcggcctttgtacccaagtcttcaaaatctcttgtgtgtttttctagtatgtctcgggttgcaccagccacattttaagnggctcactagtgggttagccggtt

SEQ ID NO: 10276 - DNA, 332 bp, Homo sapiens
  III.3904 (H53840)
  misc_feature (307)..(307): n is a, c, g, or t
  misc_feature (319)..(319): n is a, c, g, or t
ttgctacagttttgttataattagcaaataacttggatatctcttagacttctcatattttccacatagtttccaacaaatctgcatccatattcacaaatttgtaatgatacaaatccctgggctgatacatttgaaaaggaagtctgtgcaaaatcataaagagaataggattgaatattcctatcacactgtattggaggggattgattaacacatttagaagagattcttacctcttctaaaacacaagctgatttttcaacataagtgggatcaggaaatccttgttgacctcttacccgtntttaaacacaancccttttggaacc

SEQ ID NO: 10277 - DNA, 103 bp, Homo sapiens
  III.3905 (AI498570)
tgaatgttcaaatttccccaatgtttatttttttaacagatatgctatcaaatcggaatccaaatatgatgtacacatacattgtaattagtttatatgaatc

SEQ ID NO: 10278 - DNA, 410 bp, Homo sapiens
  III.3906 (AI377722)
ttttcaaattttgatgcatgatttattcaaaactaaatttaaaataaagtacactggccagaagtcatagcaaaatagctccccacagaacaccacgaaaatcacccaggtttctaaacagttctgtttcactgaagtaaagtctctgctaattagaaaaacactgatcttcagacgccactttggtttcctgatgagcagacaaaattcggtcaggggccatggaaggagccgggagcgaccggaccagggcgaatctgctgtctgtgccggcggaaggccagtaagtgccgtgcagtcgtgaaaaaggaagtggttaaagtggttacggcaaagcggtggcgccggctgctcccgacactgcagcccgagagggagagaggaggactgaaggcagtcccaggccttgg

SEQ ID NO: 10279 - DNA, 319 bp, Homo sapiens
  III.3907 (AI357511)
  misc_feature (297)..(297): n is a, c, g, or t
  misc_feature (302)..(302): n is a, c, g, or t
  misc_feature (305)..(305): n is a, c, g, or t
  misc_feature (306)..(306): n is a, c, g, or t
ggctgacttcctcttttattacttatcttcttgaccctgccttggctgttgggctctaagagcatacaaattctaccacctccagctaccaatgcgagccaagttctgagccttgagtgggaatgtggcacaactgggcactgggtaattaagtcctgggtccaggccaaaggaggacccagccttatatggagttcataggacagaggcacatgactttcttaggaggcagccaaaggcctctggactgatcagggcatcggtggcagaggagcagggtgacaggccgcctttggnctggnggnnccccttttttttt

SEQ ID NO: 10280 - DNA, 491 bp, Homo sapiens
  III.3908 (AI939497)
ggctgacttcctcttttattacttatcttcttgaccctgccttggctgttgggctctaagagcatacaaattctaccacctccagctaccaatgcgagccaagttctgagccttgagtgggaatgtggcacaactgggcactgggtaattaagtcctgggtccaggccaaaggaggacccagccttatatggagttcataggacagaggcacatgactttcttaggaggcagccaaaggcctctggactgatcagggcatcggtggcagaggagcagggtgacaggccgcctttggctgggctttatctgggctgatgctgaagctgtagaggccctggagcacaccattcaccaccacgttgggcagcgactctggggaggggttgcaaacatagggatccacatggaagctcaggacaggccgctggtgctgctgggagctgctgtcgccaggcaggaactccctcagggtgccccagttgctagcctt

SEQ ID NO: 10281 - DNA, 471 bp, Homo sapiens
  III.3909 (AI656040)
ttatgatggacataaatcactcaactgcattctgcttcactttgtgtagcaggcaaactaagaaatcaggcaaactaagaaatcaggcaaactaagaaaacagacgatgactttttaacctacatctctcaccacctttaccttctgaatcttccttgatgcactgtacccaaaagtcatttctcccaggggaaagcaagaattgaataaaacaccatcagcatttgtaacacatcgtccctctaccaggttctcatccacaggcttttgcccattgcatttcctctgcctaaagtatccagttttctccaatttaccttgttaattacctgtctttgcctgccatcagtgcctatggtaagccttcctggaaatctctacaccaataacccagtccttttaatcctcccttgatgctcccagagtatcctgtgcatttctgcccctctaaactctcgtacaattatctgg

SEQ ID NO: 10282 - DNA, 590 bp, Homo sapiens
  III.3910 (AI634505)
  misc_feature (560)..(560): n is a, c, g, or t
gcggccgcgccaactccggcgtcgggaacactcaccgcaggacgctttgccctccttggaatcgcagtagccgcagtggtagccggccctgaggcccttgtattccaccaccgacgccatggccgccgcgagggtccgctcgggccgaccacgcctcttggcgcccggggccgacctcggcgaagcgctggggcccgcggcgggaggggtggagagcgaagcctggcgcggggacccgtgggcggggatggtggtcgtgtccccaagccctgcgtttgggccggtgcttcccacagctgtgcgttatcagccccatttcacagtttgctaaagcagaggcgtactactatcaatagcatcaagaaatgatgatggaagaagcatggaaatacaatatggttccaaaatgggaaactaaaatagaggaagaggaaaagagatcacaacgtgagaaaacagaagatactaaaaaatgggactatctagtgcctgagagggaactgagtcttacaaagaaacatataccaggctgaacaaaccagaggcctcagagaccacanacaccgactgctccctcaaagaattcccag

SEQ ID NO: 10283 - DNA, 495 bp, Homo sapiens
  III.3911 (AI720867)
tttaccatttactgacacactctgcatgtacctctgcagcacttttatgtttcatatttgaacaactgcctcttctctcttcccacaattctgattctaacattaggaaccacttaatttgacatcccaccccactttcataaaaacagagcaacacaactcactttatactattgttcagaggggagaaaaaaggagcgcaggggcatggtagctttttgagtaatctctgaaattgatcttactatttggttccccaattagacacagccatattcaatgcaagtattaaaaatcaaacttttgctacaaaagctttagaccataccttttatgagacttctatgtacctatataaggtaagtttgaagaagcctaacgagttgaaggctaaagctgacagagagtggaaaagccagtaatattcaatggcagtgctctctcttcacagatattctacttaatcagttactcactttctttaacaccattccc

SEQ ID NO: 10284 - DNA, 421 bp, Homo sapiens
  III.3912 (AI570926)
tttgagtcacaattactttttttattaatcctatttattaagagattggcaactcgtttgaggagtctggtcttgtaggtagcagccaaaaaaattggaggaaatagggtgggtttttttgtttgtggtgcagtggtaccagtgaaactgacaggcaagtagctgatcccaaacaaccaaccccagaaagcacgtggctcttgttatatctggctggctcagcaactatccaagttatggggctacaggggatactgtctagaccagttcttttggccctggcgttggcagaacatagaaccagaaagccaaagcatggtgcaaacatctctctgcattttttctggtcggcagtcaagctggatggaaactaaatctcaaacaattaccaaatagcaataaataagggaataaaaagacg

SEQ ID NO: 10285 - DNA, 544 bp, Homo sapiens
  III.3913 (AI479332)
tttgctgacatcattcttaggaagtggtgtgcacatgccgtggaactttacatggaacatggagctctggggagcaggagtgctcttggagtgaggggtggtctgcggtggcccaggcaccccctggctgtccgtgaaatggctttgaaatgagcaggcactgttgagggcctcagtggctttttggtatttggctgtcttttcacttatgactcttgggtaatggcaagataacttttggggaaaatgttagtttaaaaagaaaaaaaatcaggccagcactttcactcattcctgtctgagctggtcccttcctttggccaaagctgaactaaaccaatggccttctcagactcgacttccagacagaggagccgacattggggcaaatcagttggtggtgtaatttcctgtgatgttaactttgggaacttgaacttggagtgggagctagcattttgacatgtgtccctctaacaggacttgcttgtgtggaaacagacccccacatacatggctgcgccattgtctccaattctggatt

SEQ ID NO: 10286 - DNA, 517 bp, Homo sapiens
  III.3914 (AI807397)
cctttaaaattggggtaatagcccatatcctccacatcggagaaggttcatttttattggtccaaaggaagtatatgaaaacacttccaaaaaagtgtaggtgttatcagtatatcataccatgtgagagaaggtgtaaagcaacaaaaggagttttgttttgttttgttttgttttgtttttgagatggagtttcaaaaaaaaaaaaaaaaaagaaatcctctccaatcaacaaattaggtgactgaattctttcacaattcttgcatttccattcaggacttggtggctattcttttcaaagtagaggcatgttgtgccttatagtaccacatacaacttaacaaaaatatgtagttataaaacttgccttcctggagggtatttgtagctaaaagtaaactagatttcaacttagattgccagtaaaacacattataaactataaagtattacaaaaataggtatataatattaaggttacatgtgtatctaaatcttccctaaatctgaattt

SEQ ID NO: 10287 - DNA, 509 bp, Homo sapiens
  III.3915 (AI927713)
ttttttctgctattataactatattttatatgttcaagaaagtagaggaaagcataaacgtatttttaaagactcaatttgaacttagttctaaaggttttttaaaatgtctgagattgaaaatttcactgaattagttaaataccagacaggatgctgccaaaaataaaaagacaaattgaaaaccatagcatagcaataaaaactatccaaaatgaaacacagaaagaaaaaagaaacctggaaaaaaatgaacagagcaacaatgagttgtgggacaaattcagtcaaacagaccaaaaaatgtttgtattgctttacaagttagcaacaaatacagctgaataatcataaacatggcatttctaattctcaaattggagggacaagaccaggaaaatgctcttccacttaaaacacatttgttaaaactgaaatccacaacttctgtcaagaccttcaatattctcaagcaaaatcgacacctataaagagtcaaagaaaactat

SEQ ID NO: 10288 - DNA, 368 bp, Homo sapiens
  III.3916 (AI474278)
acttagagtgatggctaaatttatttgcgaacatgcaacagcaacttggaaaggataccctggagtgtgctgggtggcccagaagctggtttaggattcaaatatggaccaacctacagacaactagcagtttaagttctgtgttcagtgtgggaattatattcagcgatggtatttctcacaccaatacaattggccttttggtcttagcctttccatccctgctttggccaggacctactcctcttgtgaaaaacagattttagcttattgaagggaatattaccctcactcccactctaagcaagtgtgggaacatggcttaatatagtgactcaagccagaggcattgcaggcagcaaagaagc

SEQ ID NO: 10289 - DNA, 448 bp, Homo sapiens
  III.3917 (AI684830)
ttttaacagctattttatctttaaaatagagaatcaagatggaaatcaagaaaatacagagggatttctttgcactaagactcagtttccagaagcagaagagactcagtttcagaaagcattatgactcgtttttagggagtcaagaaacttctctttcttacgtttaggttcatagtcaaagaaaggctggatccagggctcatctggaaggcccatttgagtataacagggatgctttctggagatcaggttgttccaggtcagctggcaccggattcctgctgcagggctcctcctcttagcaacaggcacatcttttagcctgcagagatggtccagagttgcagagactcaaagcacaaatgtcctgagagacagttacccggcagtcagtgtcactttgtattcccgcagcctccaactgcaactccggcgtcgcccgggc

SEQ ID NO: 10290 - DNA, 435 bp, Homo sapiens
  III.3918 (AI700570)
agtgtggcttctttttggataatttatgataaaaagggagatctggttgggatctagatacggctgttaaagctgcagtgttccatacctcagagggaccactttggaaatgaattgtccattgctgagtatgaagagatgtccagtccaggcaaagccttcactgaagttccatcatcgccacttctccctttttagggtcattcaaagaagataacaccaaacctaaataattctgaaagcattttgcagatcagtgctactcattcaaagggctttgcaactcaaacagattgttagtgtgctagtgataagtttatttggtagaaatgggtatactacagctttaactagccttagtgagaaaagaaattttttgttgttacaaaacaccttttttaacaaaaaggtattttgagcctacaaaaagtttct

SEQ ID NO: 10291 - DNA, 264 bp, Homo sapiens
  III.3919 (AI536743)
  misc_feature (239)..(239): n is a, c, g, or t
aatttaaaatcaagtgagtttattcatggagaaaacagtaacaaaacacccttgggacttttttattccaacaattaaaattgcattaaaaagccaacagggagtttggagaccgaaatgacatgtagagaaactaaattcccctttccttgggtttacctatatttatcttttaggcaagagagatagttgtgattaatttcttttctaaaagacaagattttccagttccattggtntcatgtgtaaaggattcttccatga

SEQ ID NO: 10292 - DNA, 320 bp, Homo sapiens
  III.3920 (R07624)
  misc_feature (273)..(273): n is a, c, g, or t
  misc_feature (306)..(306): n is a, c, g, or t
atatagcttttaatttaaaacaattgaagcaataaatcatccatctctctttccatctcaggcaaataatctcccaaaacatttgatacagtttaacaacaactgtgactagtgcaaaataaaataaatacaaactctttcaggagccaacatcaaaacctgctggacaggtgggcacaggaacagactcagcctctgccaaggctgagacaagcggcacatcaagagtggcaggatttgtgcagtgtttcaacacacccagctttgaacagnctcaacaatacctggggaggggaaaccacaagngggttttgcctaca

SEQ ID NO: 10293 - DNA, 170 bp, Homo sapiens
  III.3921 (R07668)
  misc_feature (161)..(161): n is a, c, g, or t
atatgtggcgatgactactcaaagtttggcttgttcaaatcgagactgtgttgtacacatacaatacacaccagattttgaaggcttggtaccaaaaaggaatttaaaatatttcaccaatatttcatattgataacatgctgaaatgacactattttggntgtactaag

SEQ ID NO: 10294 - DNA, 420 bp, Homo sapiens
  III.3922 (R97502)
  misc_feature (26)..(26): n is a, c, g, or t
  misc_feature (209)..(209): n is a, c, g, or t
  misc_feature (216)..(216): n is a, c, g, or t
  misc_feature (338)..(338): n is a, c, g, or t
  misc_feature (393)..(393): n is a, c, g, or t
aacatgacacagatgttctctaagantactggaaagcctcttaccagcatttgtgttagccagctcacagagaagaaaataacttgcagtagttttataataagtcattggaacattatttaaaatatgtaggacacattattagaattgttgggatctcatagatggaatgggaatgggggtgatatagataaacttactagatatanattaaanttttataaatatttcatatttttctgagtaaatatgattggattatgcaacagcatatgtaatatgggaatgttttgtagataataaaacttacatgatctgtacttccacgtgactgggtnctgaggggagttaaagcctcccgggtgccagccccagtgcttgtccaaatttgcntgacaggtcacatcatatttgtaattc

SEQ ID NO: 10295 - DNA, 286 bp, Homo sapiens
  III.3923 (R97503)
  misc_feature (172)..(172): n is a, c, g, or t
  misc_feature (225)..(225): n is a, c, g, or t
  misc_feature (273)..(273): n is a, c, g, or t
  misc_feature (282)..(282): n is a, c, g, or t
tatgtttaatataaaacactgatatcctcaaaacattacttgcacattaatttaggaaaatgaattttaaacaatcttcaaaacatgataaaggacagtgatatctttgaaaaacatacaaacaaaaacattaagaaatcacaagatgtcttatagacttgctttcccaaanttagatgtacaaaacattagtcacctttaaaagtaccccccaacacacacaanttggggaatgaaatatgtaattatagccatctttatatgaaatatccnaacaacaantata

SEQ ID NO: 10296 - DNA, 347 bp, Homo sapiens
  III.3924 (H66988)
  misc_feature (284)..(284): n is a, c, g, or t
  misc_feature (292)..(292): n is a, c, g, or t
  misc_feature (306)..(306): n is a, c, g, or t
  misc_feature (329)..(329): n is a, c, g, or t
  misc_feature (343)..(343): n is a, c, g, or t
tgcaagttttcaaatttaattctgaaaaataattttatttcataggcaggaaacaaattccagcagtgtatcacttactcctttccaacccttcccctctctctatgtccacaccatcacttcagttgtcaatgacctcagctgctactcaaggaggaaattcattaaaaaattacccacacttctaaaaatcaggctacaattgtgtgtatgtggctgcacagcgagtgtcaccaggttacagcattgccacttctacgtttgtccatttttacaaaaaagangcaaagtntacctcccccaganaaaagtacctgaaccaattagtnacttaggccccttnccca

SEQ ID NO: 10297 - DNA, 412 bp, Homo sapiens
  III.3925 (H66989)
  misc_feature (24)..(24): n is a, c, g, or t
  misc_feature (35)..(35): n is a, c, g, or t
  misc_feature (379)..(379): n is a, c, g, or t
gctgggtgtgtatgtgtgcatttnccacacttttnaatttttaaaaaatacacatatacacaaacaacatgtacagaaatagaagaaagcaagccagacttaagcttggtagagtaacggagtcctctggtctaggcggtaattgctttcagagaattacgtttatagaaatcagcgagttttgtaagaaaggagaagatgttacttcaagaaagaggcagtagagttgctggttcttaatgcacagaacacacagatatatgcacacgtgtgctgctgaggtgaggcaggtctggtgagcacggagagggctggggaagggggctaagtgactaattgggttcagggaactttttcctggggggaggtagactttgcntccttttttgtaaaaattgacaaacgtaggagt

SEQ ID NO: 10298 - DNA, 491 bp, Homo sapiens
  III.3926 (AI635815)
caattttggctcactgcaacccccacctcccggttcaagtgattatcgtgcctcagcctagcaagtagctgagattacagggacctgccaacgtgcccggctaagttttgttatttttagtagagacggggtttcactatgttggccaggctggtctcgaactcttgacctcaagtgatccgcccacctcggcttctcaaagtgctggaattacaggcatgagccactgtgcccggtctaaatctaacttttaaatgcactggaaaaccaaaacagctgtgtgactcagtttaccccgatggtctggagccgaacctgcaacatcgccaagaatgcctacactgttgggtgcaatcctgtgccttaaatctacttctctccatttgatggatgagaaaaacaaggttccgagaggttgaggggctccccaaagctacacagcaagtgggggcacagcccaaactcaagggcacgtcctaactctcagttcc

SEQ ID NO: 10299 - DNA, 372 bp, Homo sapiens
  III.3927 (AI696734)
  misc_feature (314)..(314): n is a, c, g, or t
ttttttttgagctcagaattactctaatcttttaatctccaaatattcctcaatattaaaagccattatatgaaggtacatacatgaatcagacgaaataattcacaaaggcactcagagaatcttggactcttattagcttccttaagtctataatattattcagaaaaggaactaggtggaagtctacatattattttctgaacttgattgttaagactaaactggttatacatgtctagcttctctaactggcctgacattcaaataaagactacataaatacactatttatttatgcacacttgtacacnggttgtaacaatttttatataaatataataaatatttttagaataatatagaaatata

SEQ ID NO: 10300 - DNA, 217 bp, Homo sapiens
  III.3928 (AA916192)
ctaagaatcacaacatctaagcttttcttatggtgaatcacagctcttataatgaataagttaatattttccaaggcacttagtcgtagcacagagtaagctctatataagtattttctaatctaataaatatcatatgataaagaatcttaaattatattgtgaatgaaacagatacattgactttatcattataagagatattaagaaaataggt

SEQ ID NO: 10301 - DNA, 218 bp, Homo sapiens
  III.3929 (AI732954)
ctaagaatcacaacatctaagcttttcttatggtgaatcacagctcttataatgaataagttaatattttccaaggcacttagtgcctagcacagagtaagctctatataagtattttctaatctaataaatatcatatgataaagaatcttaaattatattgtgaatgaaacagatacattgactttatcattataagagatattaagaaaataggt

SEQ ID NO: 10302 - DNA, 449 bp, Homo sapiens
  III.3930 (AI401187)
gtcaaagaaagaactcattggttgatttaagtcggtggtaaatcagaaagttgaaaataaatcaccctccttctccagggttcttccggatagttcaactctaaattcagctgagagtatttctgatgctcaaagaaaagtgtcttaaactctgatgttttaatgtagttaaaaaaaacacaaaaaatctttgctgaggcccaagctgaggtcaaaaactacctctagccatctggtgctttatttttattgattagaagtctctgataagactgatttgaatgtgatttaggaatatcacattctaaatggtcagtttgcctattccattatagaaatgacactacgggaaaattcatcatcacagaccacagcagaagtgttctttagttaaagctctacctagtcatccagaaagccagtaagtaaaccaaataaaaatagttcac

SEQ ID NO: 10303 - DNA, 667 bp, Homo sapiens
  III.3931 (AA206454)
  misc_feature (549)..(549): n is a, c, g, or t
  misc_feature (620)..(620): n is a, c, g, or t
  misc_feature (657)..(657): n is a, c, g, or t
ttttggacaggaaatcatttttaatccaagctataaagttaacactttatccataagattcaactagctttaaaaaagtggttccagtggcaatatctgtataaattgtaaggaacaagaatagaggtgaggagaccagtcaaaagactaaagcctactgcaacatcttttacctgttagtacttcttacacagcacccccacttcccagactaacacaaagtagaggtgatcctacaacagaagaaaagggacattgcccttaacttagattatcagtgactcaaaatgaaattcagcctttgtttatgcccagctaaatttcatttaagacctagaattgtagattttgccaatttaaaagacttttttacttttaaaataagtatgttccagatttgcaacttattctatcaaaaatattagttactggccggctcagtcgctcatgctgtaatcccgcacttgggaggccaagcagatggatcgctgagccaagagttcgagactagtcgggcacataatgagacctcgtttcacaaaaataatnaattatccggctggtggtgctgctgtgtccgcactgggcaagtggaggtagctgagccggagtgaggcgcntgagcgtgatgcacatgcctcagcctggtgggatggncctctcaaaa

SEQ ID NO: 10304 - DNA, 616 bp, Homo sapiens
  III.3932 (AA206719)
  misc_feature (476)..(476): n is a, c, g, or t
  misc_feature (583)..(583): n is a, c, g, or t
  misc_feature (601)..(601): n is a, c, g, or t
  misc_feature (609)..(609): n is a, c, g, or t
ggacggcatgaaatttggtgctgtgactcggattgggggacctcccttgggagatcaatcccctgtcctcctgttctttgctccatgagaaagatccacctacgacctcaggtcctcagaccgaccagcccaagaaacatctcaccaatttcaaatccgatcttctcggcttagcggctgaagactgacaccggccgatcgcctcggaagccccctagaccatcacggatgccgagcttcgggtaactctaacagtggaagaggccaggctaacagggactgctgatggggaaataaagaaataatcaaggatgaatcctatatctggggttgagcaaagagtctatcatctacgtagaactgaagatgacagaagacaccaaaggaggacgggggcttccaggaagagccagtaagatgtgctgagtaggaagatgtgaagaaaattgttgaacacgtctgacaatagaagaccnaaggctaagaagtccatttcatgaatcacaaagaaatcaagaacagaatttctctcttttgaagagagatattgcttattaagtcacgcagagattctgaccatgtntgtccctgtcaactgtgncctcatgngtgtgat

SEQ ID NO: 10305 - DNA, 512 bp, Homo sapiens
  III.3933 (AI739029)
gaaaacgtgtcgtcgaactcggacgggcagtgcagctcctcctgccgggcgatcttccccgcctgacggatggagctgatgatctcaggcacttttgtttgatcatcggctttgaacacatagcagatactctgccggtggacagcgtcttccttaatcagacaagcaaagtaacttgggtcatgactgttgtgaatcagtttgtgaacacgctgaggcttgcactcaaagatgctggaatagatcaggggatcccactgttgacttctccctggctcaggttcacatctcagtccagagggtgaaacgcaaagccggacttgcttggttacaggttcctttctggtggactgcctgctgagtcttcgcacctcagccacaacccagggcagcatgggcatggtggtcagggaatgcacaggcagggagcccaccagctgcaggccaaaatccaccgagacctcgttagaaagcagatgtttccttgctgtgaatgttattggttccatctt

SEQ ID NO: 10306 - DNA, 560 bp, Homo sapiens
  III.3934 (AI636771)
  misc_feature (557)..(557): n is a, c, g, or t
ttttttttttaccagcaatacaaatctctttttattgggacttcataatctttttcaattgaacagttttgaaacactctttttgtagtatctgcaaagttggagggctttgggaattctagaggaaagggaaatatcttcccttaaaaactagacagaagcattctgagaaacttctttgtgatgtgtgcattcatctcacagagctgaacatttcttttgattgagcagctttgaaacactctttttgtagaatctgcaagtggacactgggagcgatttgaggcctatggaggaaaaggaaacatcttcacataaaaactacacaaatgccttctgagaaacttctttgtgatgtgtgcattcatctcacagaattgaacctttcttttgatcgaacagttttgaaacacttcttttgaaggatctgcatgtggataattggatcggtttggggcctgtggtggaaaaggaaatatcttcaaataaaaactacacagaagcattctgagaaagttctttgtgatgtgtgcattcaactcacatagttgaagatntct

SEQ ID NO: 10307 - DNA, 445 bp, Homo sapiens
  III.3935 (AI668798)
tctgccaagctctttattaggatatatattgggataatctaattaaagtcactttacaattaaaaaacgcctagtaattttgatgggaaaaaatatcaggagattaaattaactagcagtcaaaagctgattagcagtaagattaagtaaataagattaaacatagggtactagacacaaatgtctaaagacaacatgctcggttttaagactcctagtctccctgtcttcagtcttgtctccgtcaagttacatacctttagagtgatttggttatgaatgcttaaaacagattgtagcaatatggaacatgcaggaaagaaacaggtactgaaagccattacagaagaagttgaaacaaggtttgaactcaaatacctggataatgtgatataaatcaaaaataaacctgagatgttaagaatcataaaaagaaatctcagaa

SEQ ID NO: 10308 - DNA, 414 bp, Homo sapiens
  III.3936 (AI796025)
catatggctaacgcaaatttattttctgtaggcataacatcaaaaacacctggcaggattgccccattcccagcactgtctatttctcccctagtatcagtgggactccactgatgcacagctgtgatctactaaaacttctctcaaaactttctcctctccttaggtcagcagccccgcccctgatctatttggaaatcccctgaataaaagttgaatatcataaaccaaagcgaacacccagaaattcaaattcaaccccgtaggtaaaaaatttcttaaggtgactgtagacgtagatgtctccagtgtcgcctaataaggtagaagaggccagtgcgatactgtctttacacccttaacttgggtgctagaatatttatcttcgtcatcattttatcatccaaactattt

SEQ ID NO: 10309 - DNA, 333 bp, Homo sapiens
  III.3937 (AI559305)
atattatttacattgacaagtttttaaaatatgaacatttgtaaatgaaataaattagaaataaaaattaaaaataaaacagaaataaacattagaaataaaaattgtcaaattatttgttactgtggaactctggctatgcaccagatacaagaaaaaccagtaaatacatgacatatccttacaagctcttggggtcaggagaaaatcaaagtattaattgcatatcctttctagtattaaccttttactacagaaatgaaagagttaacaatgcacagttatatttcaggtaacatatattcaaaggtatatcaaaggtgaaaatctatc

SEQ ID NO: 10310 - DNA, 664 bp, Homo sapiens
  III.3938 (AI819498)
tttttttttttttttttttttttcatggataaaaggggcatatttatttcagggcaacaagcgtatccacagcaaagcaggggggggtaaagcccacctcggggcctgcaagccagccagcccctgccggtcgaaaaggaagcctgtgtgagagcacacaactggaggccgggcggggaaaaaaaacacgtgccaacaggccacgcaggccaggaccccaaacccggaggctgcgcccttttgagttcctctctctggtctccgatgttcttctgtggggatcatttcaccttgaacaaggtgacggtggtactgtaaaagaggctcaggaggaagaggacaatgaaggtggaggcggtggcccacaggttctaaaagccctcctcgtcggcgctcacctccccctcgggggacttgtccacggtcctctcggtgaccctgttgggcagggcctaatgggccaccacgcaggtgtaggtctcccccgtgttccattcctcttcggacacggtcaggatgctgtgggcgaagtaccggcctggggcctggggctcaggcattggggcgctggtcacatacttctccggggacaagggctgccccctctgatccactgcacggagacgtccggcggagagaagccgtcacccagcacgtgatggtg

SEQ ID NO: 10311 - DNA, 344 bp, Homo sapiens
  III.3939 (AI921671)
ttttttttttttttttttttttttttttttttccctaaaaagtttttattttttttcattttttaaaacgggcccactgcctggtttcccccgccgggtgggcattcaaaaaagttttttttttttaaacccccaatttataatccggggaaaattccttttcagggtttcccaaaacattattcctggaagggggggacctttcccagaactcgggataataaaagtttggttcggattttttaagtcccctcaaacagaccctggaccacgttaaatctaacacttaagggcttggaaggggcagtaaaaaatccccagggaattcaaaaattgaaataatt

SEQ ID NO: 10312 - DNA, 586 bp, Homo sapiens
  III.3940 (R60964)
  misc_feature (432)..(432): n is a, c, g, or t
  misc_feature (441)..(441): n is a, c, g, or t
  misc_feature (472)..(472): n is a, c, g, or t
  misc_feature (494)..(494): n is a, c, g, or t
  misc_feature (512)..(512): n is a, c, g, or t
  misc_feature (545)..(545): n is a, c, g, or t
  misc_feature (581)..(581): n is a, c, g, or t
ttttttttgcctatatttactttgttaatacattacatttattgtttatagaacagaaaatgacatcatccattcttttggctcttcatattctgatgataccataaaatgtaggaacttggatatttttgaaatgaccaggacatggaaccgctttgcctgaaaaaatgtttcaggcacttctcgcttcagagaatgacagtctgcctttaccttccaatgtccttccccatcctgtacatttaaccagggtccttttgttggggagggttatggagtgagaggttcaatgtgggaaacttccaggcctgggctgaattgtatgggtgctgtctatgaccgtggggcttttctgtgggccaggcacagtgggtgcccacctgtggaggctgggaagttcattcacctgtttccactgtgggcagttgggcnggggtcgtncattcacatttcatccaccaagtttcccttngggagtgggtcggtcccagctntagggggttttccatttnacaggcccaggagctccatttttgaggccccanttccgccatgagtgggttctttcgggggtaggatcncgatg

SEQ ID NO: 10313 - DNA, 449 bp, Homo sapiens
  III.3941 (R61631)
  misc_feature (440)..(440): n is a, c, g, or t
tcagcatcctgcttatcttcctctgggtgtttgaaagaatcaagatcttcgtgtttcagaatcaggtggtgaccaccattcctgtgacagtgacgccccggggagacttgtgtaaggagcacttatcctagaaaggccatttctgaagactcagcaggaccgtggctgcctcattgtcatcttctgggaacatcttaggaccttttgaaagagcccagcggacacctgcgggcttgtgtgcttttccctcagagacaacggttctttccggttttgctctacacagttccgtatcttcagagctcctgcagaattgtcagggactagtttgtgggaaaggtctgagagttcctggaggctataattagctttttggggttttccttctttgccttagcgttgatttcagggagaaaattgcagtcagttcagacatcttnggaaagagt

SEQ ID NO: 10314 - DNA, 556 bp, Homo sapiens
  III.3942 (AI424858)
  misc_feature (544)..(544): n is a, c, g, or t
  misc_feature (551)..(551): n is a, c, g, or t
tttatttaaaaatttttttaattaaacaaaaatgattctacaatcaaagcaaaattctgagtaacataacaaaatcctgtgataatttaagaatgtggggcatgaagaccatttaaaacagttgttcttaaactacatttttccaagatcaccttgggaagacaaacaggaagtcttagccaggtcaccaagaccctcttccctagttcaactactcagctatgcttcatctccactacatattgaaaaattatgtacgatgccatttcaacaaaaggatggtgaggaaataatttagaataatattccaatattaatatcaatattttactggataaactatgtaatagctccaagtgttatcatcagagagagaagaaagttttcttctgatgaatgactctgctcagggctcccttcatgtctctgttcctcaggctgtagatgaaggggttcagcatgggggtcaccacagtgtacatcatagccatgacagtgtcctttagagtagaactattagctgatgagcataagtagagtccanatacggntccat

SEQ ID NO: 10315 - DNA, 582 bp, Homo sapiens
  III.3943 (AI925877)
gatgggtgacatttgtttatttgtttttctgttttaatcgagggactagtcaagtgacaggagttctgattcctgcagttcttcccgtttccctgagtttaaacatcaactttctctcattggctacgtgggccaataaatttttggcttttttgacttaaggtagtttgagctagattcctaattattgcaatcttgactatttctgtagcacttatgatactaaacctgtttagttttgtaaaagaagggcaagaacagttaaaccacatagctacacaagaaatctgatttgttcttagaaagcagccaccaggtttgttttctccctatgactaactaccatgtattgtatgtattatgagacccaatacaccgatgatactggcatcatgtatcacccttaatttcatttcttgtccctctcaaaggctgttaaagtttcatcctaggttgtatttgctaatgctcttaaattgtagagaaaaatattttgaatacattttaagaaagatgcttttttaacatattccttccactagtttcttttcccaaccacaggacaatttaagtagatttcct

SEQ ID NO: 10316 - DNA, 419 bp, Homo sapiens
  III.3944 (W04687)
cacaaaacattttattactataattgatattttacttataatttttggcaacattaataaaataataaatttcacctgaaagaacaagcgagcaaaatagacaaggaaattcacaaagggcaataacaaaatagtaatcttgacatattcaatatatttgtaaacaaaacaaagtgacattgccttaaaaatatatagaggtatcaatagaaaaacagagaaagctcctgaaagaactcactatattaattttcatttggttgcaggcacagaaattgactcaagctagctcaattctaagacagaagcaaagccctttgatgatgatcgctttccagctttttcatggaaaacctaggaaatttaaatactttggaagaggaagaaaagagtggggagagagtaaagtggcctttaag

SEQ ID NO: 10317 - DNA, 391 bp, Homo sapiens
  III.3945 (W31789)
tagaaaattttctgactctagatccatagattctgttgtatttatttgccggacactcatttgattgatttgcaccttgaacactatactaggtcttttcagttacgttgcttgggttaagacactttgctaaaattacagcctgaatcctttctttagttgaagaaagggtatgtgtgtgcaagtgggtgtgtgtgtgccagtttttcttgtctcaggtagatactcccactgtgtataaatagatctacagacttttcatacttacctcccgtattctgtttctgtggtaaaaatatcgaagtgttttagttgtatgttgagtgattggttggtattatcaacactgttgtttgcagtctcattaaagcatgctcttaaggagtacata

SEQ ID NO: 10318 - DNA, 363 bp, Homo sapiens
  III.3946 (AI610079)
ttttttttttttttttatcataataggcaatagctattttattataactccattgggtgtaaaaaaatgactcaagatggcgaacaagatacagtaaaatagaaaacaacacatacaaatgagcactaggagatcaggacaagttatgataacctacacaggcagtcagttagggatacaaactgagcattctggcaaccaaaatgagaaggtcatttgcttacattgttttagaaggaaaaaaatatgtccattcttcaaggaaaacaaagcttttctaatacttagaattaagatgaattactccattggtcttcatgtaattatacaatgtctttgatataaaaaaatttatatttcata

SEQ ID NO: 10319 - DNA, 469 bp, Homo sapiens
  III.3947 (AI636321)
ttttttttttagtttttttaaacagggtagaaagagaataaaatttacattgtccatgatgttttccttagaatgacagtgaaatgagtttggatcctctgaacacacatcagttgagcaatagaggaagcagcccggctgctgtactcgcctggaattaaaactctgccaccgaccgtccctcacagtgcctaactcacatggaactaagcaggaactggctgcatgtgatggaaacactttaacctgtgtacatatccagcatatttattcaatctacccttttgtcagatagcttttgtttcattttgtcaaaatctgtttgatcctataaaaaccaccaccgccgtccttccaccctgctttggcctcaaactactcaaactagcgcctcacctcattccatcctttcactccctgacagcgtcacccacgtttgctctttcctcatactcactccccagagcct

SEQ ID NO: 10320 - DNA, 443 bp, Homo sapiens
  III.3948 (AI424894)
  misc_feature (431)..(431): n is a, c, g, or t
tttttaccctattatcaagatttttattgtatttactcttcttgtttcagtccctttctttacccttgaagctttaaagtaaatctgtgacacctgcattgcttaaggatttcctttaggtgattaaatgagatcagggtggtgtctattatgacacaaacaaaacaaaacagtactatgatgggaggtacaggaacccagagatggagggagaggcaggggtaagaacaagagcaggcatcttccttcctcccaggcacagaagcaaagggaggctgtggtgctgacatccccactgtgtaaggagcgggagggctggagccctggagaacaacgagaagagtcctgcttcagctgtgccaaagaatgggttctttttcttatggcagccacatgcagccacagcggtggtgttgaaatggggaaggttnccccgtccccct

SEQ ID NO: 10321 - DNA, 366 bp, Homo sapiens
  III.3949 (H08815)
ttttttttttattcactacattttattaatgtttgagattttacaatgagaatattttcctgaaatattcgtctgatgctaaaaattaaagaagaaaagcagctggccacatggctgggagcctgaagcagggctcagtctgggcgctcataagaggcagggtctgtgggggtcaggcctgtttggtagtctcaagctacatctggagactcttcctaaatccactgtggctccctctccccaaggccagagccagagagagctggtttccacagcagcagtagcatacgcagggtccctgcaatctgggaggtatgtgacaccgggacatttaccctgtgcggtggggcccaccttttgccacct

SEQ ID NO: 10322 - DNA, 497 bp, Homo sapiens
  III.3950 (H08894)
  misc_feature (433)..(433): n is a, c, g, or t
  misc_feature (444)..(444): n is a, c, g, or t
  misc_feature (460)..(460): n is a, c, g, or t
  misc_feature (480)..(480): n is a, c, g, or t
tctgcctcctggggctgttatgagggctgaagaaggggcaggcacagaggagacacttactatatgatcattgtcctcctagagtatcatcaccatcaggtggacttcagtggccatcccaggcctccacggatcaaccacaagatcttggagaatgtccttaccctccaagcctcagtttacctttagggtgaccaaccatcctggtttgtccaaaactgagggttttcctgggcacagtcccagggcaaactgggatggtgagtcactgatatagtttgactctgtgtccccaccaaatctcaccttgaattttaataatccctaggtgtcaagagcaggaccaagtaggagataatttgaataatgggtgggcagttttcccccatggctgttcttcatggatagtggaagtgagtttcttcacggagancttgattgggnttttattaaggcaggntttccccccttttgttcagntttcaatttttcccttt

SEQ ID NO: 10323 - DNA, 276 bp, Homo sapiens
  III.3951 (AA805381)
tttttttttttttttttttttttttttttttttttcattcatttgtatatacagacatttacaaaattttaatgccatcaatccagtcttgtgtgtgggtttttaaaattatttttcttagttcacttttccgtcaataaggatagaaatattctacttattgaaaaaatttagacctatatgttttaaagctatttatagtattatttttatatcttttaattgtctgaaattaattttactacatgatgtgaagtaaggattatgtttatttta

SEQ ID NO: 10324 - DNA, 491 bp, Homo sapiens
  III.3952 (AI694212)
  misc_feature (407)..(407): n is a, c, g, or t
ctcatccataatgaacttctctggaccaacttgaccgtctactggaaatctgaatgctgttatcactgcttgtttcaggttctggtaaacgttcctcagagtccaaaagcagggaagcctagtgctgcagctgcctctgtcagcacccagcacggatctatcctgcagctgaacgacaccttggaagagaaagaagtttgtaggttggaatacagatttggagaatttggaaactattctctcttggtaaagaacatccataatggagttagtgaaattgcctgtgacctggctgtgaacgaggatccagttgatagtaaccttcctgtgagcattgcattccttattggtcttgctgtcatcattgtgatatcctttctgaggctcttgttgagtttggatgactntaacaattggatttctaaagccataagttctcgagaaactgatcgcctcatcaattctgagctgggatctcccagcaggacaga

SEQ ID NO: 10325 - DNA, 547 bp, Homo sapiens
  III.3953 (AI797034)
tttattttaaaagtaaatattttcactttattgagtcaaaaatacaattcctgacatcattaaccactctagagaatgaaagggcacaattctccactctgtggatgggtcaatgctgtgaactagaaatgagcttatcagatagatggccctgttgactattatcagtaagaatggctgaacagcaattctcctaaaaaaaaattattttccataaatttcacccaagacttaatcaatttattgtcaaagatatattaagtagaatcaaatcacttgttttctgttacattgtgtagcaaatacttcttgaatgattttgcaggaagtaatatttatgggtgtttgggaggattttattggataattattccccctttattggatagttattcccccttccacatttttctagacttaaattattgtagccatgttttatggcagaaaactctagagttccaaatgtccattttccatgtgtttaaatgtgtgcctattaattgttcatttatttttaaatattacaataatgttatcaataatt

SEQ ID NO: 10326 - DNA, 448 bp, Homo sapiens
  III.3954 (N62953)
taaaattcaaatcagtgtattaacagaactacacaaatgtttacaacacagtaactacacttttcaattagttcattgtgaaaactgagcaaaatattttcaacaattttgggtcaacaaaaagtatggaatattttaagacaataaagagtgactggtgttcgagagtactgaggctacacagaggtactgaaattcaaatctgaaaaatactgtgctggccacacaacactacaaatttctaatggaagaattccctttttgatccgcagcttaggtggtaagtaaataaaaaaacagctcagaaaaacagcaaaaatattaacatttaggagtctcaaaactttgtattggctgtgagtctgggggaaaaaaacataaatgtcatactaccaattaaactttcaagagtcatcagattatttagctttaaaattttactaaatca

SEQ ID NO: 10327 - DNA, 415 bp, Homo sapiens
  III.3955 (N79856)
  misc_feature (263)..(263): n is a, c, g, or t
  misc_feature (269)..(269): n is a, c, g, or t
  misc_feature (282)..(282): n is a, c, g, or t
  misc_feature (315)..(315): n is a, c, g, or t
  misc_feature (350)..(350): n is a, c, g, or t
  misc_feature (374)..(374): n is a, c, g, or t
  misc_feature (381)..(381): n is a, c, g, or t
  misc_feature (412)..(412): n is a, c, g, or t
tgaatattttgaggtttctaattaatggtatgctagtttctactgttttatataaaaatttatctagtgttgtataaggactttagtattgtggatgatgggagtggctttttgtggcatatggttgttttaattgaaatattttttcagtttattacaagtgtgaaaaaacactcaaaactctggattgtttaatttcatttttggttggattaatggtaatacattccttcacggtgggtttaagaattgaagcccatttnaatccncaccttaaccttngggaaaatggtggcagcctggataaggaagganggggatttggggtaagggaagaattggggcttttnacccttccataattaaaattattnccagttngggttaatgggaattaattccaaaaccttanttt

SEQ ID NO: 10328 - DNA, 236 bp, Homo sapiens
  III.3956 (AI279925)
tttttttttttttttttttttttttttttttttttttttttttttttttttttttttttttttttttaaaatttaaacaagggttattattaatttacccctttaaaaaaccccccccccccccgggggaatttttgggggggggccccacccaagggccgggactttaaaaataaacccccccctcccctaatttggggactaaggggggggcagggttaaaaaaaaacgggggt

SEQ ID NO: 10329 - DNA, 300 bp, Homo sapiens
  III.3957 (AI587288)
ttttttttttttttttttttttttttttttttttttttttttttttttttttttttttttttttttttttttttttttttttttttttttttttttttttttttgggggggggggcccagggttttttttcccccccaaaaccccggaaaggggctttaaaaaaaaaccccccccccccccaaaaaaaaattgggaaaaaaaaaattttttttcccttttttttttttggggggggaaaaaaaaaggccccccccccccccccaaaaggggaaaaaaaagggggaacccccccccccccc

SEQ ID NO: 10330 - DNA, 446 bp, Homo sapiens
  III.3958 (AI560384)
ctcacctggattgcaggctcactaagaagagagcctcgcttcctgttggcatccaggctggaggctggaatctgtagggtaactttgtattctgttcttttatccagctcctcagcaatgtaattagcttctctcaccaatagattggccttaacaatttgttccctcagcctcatcaggctgttattcaacgttgcttctctctcctcagcccactgtcttaagcgttgctgagcgctgggcgagtggaaagaaaacctgtccatgctccggcagttctgcttctcaggagacagccttctccggagctgctccaattcgtgctcatacataagcctctggcgctccagtgcagaatcgtttttcttcttcatgctggttgttctagggctgtttaatatggactgcattcggatcattgctgcccagggccctccctcgtgccc

SEQ ID NO: 10331 - DNA, 402 bp, Homo sapiens
  III.3959 (AI801500)
ttaactgggcctggaagtaatctgatccttaattattgcttaggggagggaataaccctacaggctgaagatttcattagcagcccaccagtctcttgaacataatgtggcaatgcttctatcatgtgtgtgtgtgtatatatatagtctcccttccgtccctccaaaataataaataactttaggtgaaggacatcagaaatagcaaaaaaatggaaatatggaaattatgtgagttttttttttaatacataggacatctagccttttatggagtaagtctgccaactccagtctaggttgtagaatgcagaatgatacagggaaatactgaactgatccagctccctccactgaatggctgtatgtgctttgacaagtcacaatctctttcaaaactag

SEQ ID NO: 10332 - DNA, 454 bp, Homo sapiens
  III.3960 (AI623715)
tttcttgagacgagtctcgctctgttgcccaggctggagtgcgatggcacgatctcggctcactgcaacctccacctcccgggttcaagtgattctcctgctttagcctcccgagtagctggaattgcagacgcccaccaccacgcccggctaattgttgttgtatttttagtagagacagggtttcaccaggttggccaggctggtctcgaattcctgacctcaggtgatccacctgccttggcttcccaagtgctgggattacaggcgtgagccaccgcgcccggcctggggtaccactttaagaaggctcaggcgaaccaccttaagatagtgagagtctgcctgccccataatattatcagtccttcaaagtcacttcaaataaacactaacagcagcttggagacattcttccagactcccccttttactccccgaggaaaaacgagcg

SEQ ID NO: 10333 - DNA, 501 bp, Homo sapiens
  III.3961 (AI393202)
ttttgaactttcagcctgggcagagcctttattcttgtcacccagcaggggtgataaggtgccaccaaccttctgagctgccatctaaggatggtaagagcagcctagcatcagctcatgctcccttagatgttagtttttggggccaatacaaaatctttaggtggccctccaccactgctgctctgtctgtctgctgttggggagccagggagaggctgcacccctagaaggggtcccacttctggatctggtttgctgcgtttggccaggtcctcattgtgagccttgcggatgtggcggtagaggtcccctgactgcgtgtagctccgcaggcagtagcggcactcatagggtcgctcacgtgtgtgcaccgtggcatgtcgccgtagtgtgtaagagcatgagaaggtcttcccacatgtcttgcaggtgggaacatcctcagtaaaaaccccaaagcttcctggagctgcttcgtactcagaagacaggtaaagt

SEQ ID NO: 10334 - DNA, 622 bp, Homo sapiens
  III.3962 (AI830102)
aaagaaaagaggtttaattggctcacggttccatgaggtgtacaagaagcatgactggggaagcctcaggagacttacaatcatggcagaaggcaaaagggaagcaggtgcatcttacatgactggagcaagatgaagagagcgagaaggggaggtgccgcacgcttttaaacaaccagatcttgcgagaattctatcatgagacagcattaaggggatgatgctaagtcattagaaaccatccccatgatccaatcactttcccccaggtctaacaatttgacatgagatttgggcggggacacagagccaaatcatatcaagatatttgaatatatacatgaaaattaaaaatgtctgcagatccattataaaaaaaacaacataaaacctaaagacatttagccaactaggtatttttattcacatcaactataatggtttttatattctgaatatgtaagtagcatttataactcaataaacaaattatgcacattccaacataatacagacaaaatacatgaattgaaaattcacaaagaacctcagtggccaaaacacttatggaaatgggctcaccattgctagcaatcaaagatatgagaaataaagcatcaat

SEQ ID NO: 10335 - DNA, 434 bp, Homo sapiens
  III.3963 (AI565101)
gtttttgtagagacagggtctcactgtgttgcccaagctggtcttgaactccggggctcaagtgatccacccatctcagcctcacaaagtgctgggattataggtgtgagccaccatgcccggcctgtttttgtgtgtgtaaataaagaatccacatcattattcagtggtcttataatattcttgattgtagaatttatttaagtaatcttttattgatattttgctatcttaaacaccactgtgatggaatccatttggctcattcttttcttattaggtccttagaataaattactagaagtagagtgaccaggtcaaaaagagtgttctttttaacatttttggtgtttattacagttgccctccagaaggcttatatttattataggtttattatgctcccaccagtagtatgtgaggagtactaaact

SEQ ID NO: 10336 - DNA, 435 bp, Homo sapiens
  III.3964 (AI400772)
tttttttttagatggaggtaaaagtgagtttatcttatgctcagcaaaacatatttaggtcagtttaaatatgagcaactggtaaatttatcctcagctagcatagaggtgggcattgttaatacgattcaaagcttggttgggcactcttcgttttatagtatgcctgggatacagcacatctgtgagacaagaaaggctaaactagagctctgcttcttctaatcctgcattacaaatttaataataaagtacatttctgctatgtttgtggttttaaaattattcactgtaaacatcctatattctttcctaattaatttcagagctggaacttatatctatgtctatgtcaaattatcatttattctatgaaaagcagcacgaatactcttcattctggtttgacacaaattccttaaaaaaaaattaagg

SEQ ID NO: 10337 - DNA, 493 bp, Homo sapiens
  III.3965 (AI492471)
  misc_feature (29)..(29): n is a, c, g, or t
ttttttagcttgtttttttttcttttggngagaaaatagggtccttttcctatagaagtaaaacagtctttttggggataacatcttagcatcattttgctgctgagtaataaccaagacgtattccacctgcttggtcatatctacttctgaatcttcctagtcctgagtttcccttcaaggccttctaatttgtgcattttaccagcctcccaacaatatctgacctcccatcaaagagtagggccaccaaaactaggactctagaatgaaccctttgcagaagagtaagcattgtcctatatatggtttggtgaatcacaatactgtatacagatagttcagttgttatgaaggatcattttcaaaagctaaatgtccactttccatctaaaacttcatcatattcaccccagcaagtcatttgaactggaaaaaagaatgagggggaattttaagccatttctcctatttcaaaacatggacaattgaa

SEQ ID NO: 10338 - DNA, 467 bp, Homo sapiens
  III.3966 (AI686420)
cttgtcttctcactttatttcatcaatttgatcttcaattactgatatccttttttccacttgattgaatcagctattgaagcttgtgcgtgcatcacgaagttcttgtgccatggttttcagctccatcaggtcatttaaggtcttctctacactgtttattctagtaagccattcatctaaccttttttcaaggtttttagcttctttgcgacgggttagaacatgctcctttagctcggagaagtttgttattgccgaccttctgaagcctacttctgtcaactcgtcaaagtcattctctgtccagctttgttccgttgctggcaaggagctgcgatcctttggaggagatgaggtgctctgatttttagaattttcagcttttctgctctggtttctccccatctttgtggttttatctacctttggtctttgatgttggtaacctacaaatggggttttgg

SEQ ID NO: 10339 - DNA, 488 bp, Homo sapiens
  III.3967 (R78605)
  misc_feature (317)..(317): n is a, c, g, or t
  misc_feature (334)..(334): n is a, c, g, or t
  misc_feature (341)..(341): n is a, c, g, or t
  misc_feature (364)..(364): n is a, c, g, or t
  misc_feature (369)..(369): n is a, c, g, or t
  misc_feature (380)..(380): n is a, c, g, or t
  misc_feature (424)..(424): n is a, c, g, or t
  misc_feature (433)..(433): n is a, c, g, or t
  misc_feature (441)..(441): n is a, c, g, or t
  misc_feature (457)..(457): n is a, c, g, or t
  misc_feature (463)..(463): n is a, c, g, or t
ctctttgatttccattttattccttacatacacggtatagtaaagacaaaagtactaatcatagcaaataaaggggaagccgtgcagttggaaacagccatgcctgggtgcaaatgctgccattgtttaattgttgatgatgctgcataaggaatccttaaggtagaagcaatcttgaccttttttatttttgcaggcccctgccagtgcccttctccagactatattcttaaaaattaaagtgctttgggtttgtaggagttgactgtatgtatctcccaaaatggaatatggcaggcagtgattttttttttccnccctggatctctttccnggctttngggaattctgtgaggggtgttantcatntgggggctgtncctgggcagggtaggggggacataccaggaccagcgggttccanagcagtccngttcattntcggggtaaggggccnccaagntgaggttgcaggcacttcttgcatt

SEQ ID NO: 10340 - DNA, 446 bp, Homo sapiens
  III.3968 (R78606)
  misc_feature (9)..(9): n is a, c, g, or t
  misc_feature (11)..(11): n is a, c, g, or t
  misc_feature (12)..(12): n is a, c, g, or t
tcacaaaangnnctagaaatctgcaaagctatgtttcatgttttataatcactgaagcaattcaaatgaaaaattcacttggcatcctaagcataggctctgcaaggtaaggagtcattggtacgtctgcttcaggttagaagtgatctgggaaattacagcccggttaggatctcctgggtctagaatttccctagggcaactggattgggtcaacgcctacagatctgggtgcactcaagcgtaaaacttctggagaaattcactatggtagattctatcttccttccagattaagatttacgtgtatgaatgcagaagtgctgcaactcactttgatgttcttacccgaggaatgacaggactgctgtgggaaccgcatgttcttgtatgtcacccaacccgccagggacagccccattatggttacaccctcacagattacc

SEQ ID NO: 10341 - DNA, 501 bp, Homo sapiens
  III.3969 (AI803369)
ttttatatttatttgctcaaatcatatttattaggggcctgctatctgccaggcagtggggatgcagcgatacacaggtcaaataggcatttggagtgtggaagtgggtgcccaccctagtcggggagcatctcaggatgtcctcctcaaggagatgacatgtcaactgagcccagaggacaacaggagttgacagggaagagtatttcctagagcgagaaactggaggcagctgtagaggtgctgatgggttctggccaccacctggaccacctagatttgatgtttctccacccccacttagttgtgtgaccctggacaagttcctcacccactacgtgctttagaaccctcactgtgaaatgggagatgtgataggaatgttgtgaggattgtttgagtgaatacatgcaaaggacttaggacaagcctggcacatagttaatgctcaatcaatgttttctctcgcaactggagggaaacaaggtagtgggcaggaag

SEQ ID NO: 10342 - DNA, 515 bp, Homo sapiens
  III.3970 (AI766049)
gcttttaaacttagcaattttattttgaggttctttcaaacataacaattttatttcaaagtcagcaaaatctgtaaattagtttcacaactaattaacaactattttttggaggttattgatactcattttatctgagctggtaatttttcatttactagagaagtatcattaaaatcacaatgctttctttgccatcaaataaattaaaagatgaaaaagctcctcccctccttatacataaattcttaggtccctcttgaaagtcatccgatactgaaaacacattaggccctttattggttcttcccccacgttcttttcgtttgattttcttcggcaagccacgtccacgaccaacattaaaacttttaactctctgttcaataccttgctgaactcctttcattctctgtttttttcctgattctttagaaaatgatgaccctaaagcaatatttgaggtttctttagcttgcctgtattgtttcagctgattggcaaaatcttcctct

SEQ ID NO: 10343 - DNA, 562 bp, Homo sapiens
  III.3971 (N32516)
  misc_feature (512)..(512): n is a, c, g, or t
  misc_feature (554)..(554): n is a, c, g, or t
attaataaataacttttattcttccatggcaatgagccaagcctttaccccaaaactcaactacaaatcctcaatccctagattcaaatagcgcattggaatatcctattttgtatagggcagggaattacattccaagggagatgagaaatgattgaacatatttcaatatcctcatagcggggtgccctgagagaggctggtttcccatgagctctgttgttcaccaggactctggccactgggcagacaaacgatagaatgtctatttttctaataaagccatataaggaccaatggtagcccaccttttccatggtggagtccacagatgtggaaatacaacactctgaattagtcacattagcagccacattaagcatagaaccaaatgggcagacagaaatggctctgagagcttacctaccctcatctcattcttgaatttcttcctcattttttttctcgggcaaaattcaactaggcacacaaaaaggatatctccttaatcnttaaacatggtatggacatggtatggattgaggtctgttggnaccccatt

SEQ ID NO: 10344 - DNA, 515 bp, Homo sapiens
  III.3972 (N42729)
  misc_feature (509)..(509): n is a, c, g, or t
aaaaagaacaacctgccacattgctgctatcaggccgttagtcctagtgtctgctgggtgctgggtagtagatttttcttgtactgagcagaaatggcatgttgtatactaaacgtatcatgcagtatttggttttattctgtagtgaattttccacaaccgtgggctacaactcataaatatgcaacatatatgtttttcagtaggagttgctacattaggcagagtaaatattttgtagttttccacagtgtcttttccttggtttgaattacctgcattgagaataatgattgttgccaccaaggcatgcttgactctgagatataaatcttaacaaagaataacttctcaagatatactctacctacttgaaaccacagggttgtgggcccatggtacatactgccatttgcatcaaactagccagtaactcagaatgaaatcattttcattaagaagctctctcagcatattaggattatatgtagatttgtatggaattttgnaattat

SEQ ID NO: 10345 - DNA, 543 bp, Homo sapiens
  III.3973 (AI924247)
  misc_feature (484)..(484): n is a, c, g, or t
aaacgatacacattttaaaaattcaagtcaaatccagatagatagatacaggccagttggttggtatcagctggcccctcatacccaccataggaaagcatgatgagaaagtccgtttctgaaatgagagagacaagaggcaccagcttcttatctgggggtgagttccttgagcttgagaggaagcctgagagggaaatgctaaggctcaatgaaagacagggcagctccagcctcgcggccctcctgggtcaaaagccaaaggcctctgtgcaagcagcacataggatctggatgtaggttgaggatagatcctcacccaccagtggggtaactttcccagcaattctgaaactaaaataaggaaggcacattcccagagccctgctgagtaggggcttcaggctattttcactctacacaaaatgggggagaggagttccctctccactaatttttcacccataaacctccacatcactangaacctaaaggggaactccaaaggccaacacatccttggtggttatatgtgttgtcctg

SEQ ID NO: 10346 - DNA, 365 bp, Homo sapiens
  III.3974 (AI459314)
taaattgctataaagacttttatttatgaaagcattattcacttgctattacataagaggcattcaaccagtacagctttgtgaactttgatacctctcaaccatctcataagaaaacacatccatgacagagtcagtgttgcaactctaaatgactgcaaagtcaatttactttcctaagtggctgtatttgcatcaacctattgaaaccatgatggcttggattatgacaagttttatgttcaaacgcattttgaaatatgaagggattaacagtaaaagaattattgaaaatactgtttgaatgagcttaagatctagaatagagctggctacactgatcggaagaggaaatgcagttcaac

SEQ ID NO: 10347 - DNA, 460 bp, Homo sapiens
  III.3975 (AI424286)
tgcattgcacacagtaaaatgttgcatacatgtgcattttattagtctcacatttcactcatttaatgttgtcttctgggaaaaggaatctcaatatctatagcaaatctaattctagagtaggaagggaggaaaactttcactgctggtgtcaaaagccggagagaagagcagcctgagagccaggcttcaggcagcagagagacgggacgaaggctgccctgaagccacagtctggcagcacacaatgtatcatcagagtgtcacctagtgaataacctccgtggcctttccattctcctcagagggactcatgggagcagacgttgcctgacggtctcagccagcctgaccctgtgtctgccgatgccctgctgaccttgccacccagcacgagttgcctctcccagcttgagtccgggagcatcgcccagcacaggggctcaagctgggggtcatc

SEQ ID NO: 10348 - DNA, 358 bp, Homo sapiens
  III.3976 (AI417714)
tggcttctgtatttgttttatttgtgttcttacacagtctgtgctccagagactttgggggctcctgccaggagaggctggtcatgctgggtctctcaagtacttctcatctggcccagtggtggctcccaagatctttactcagggacctggggccacagtctgactggaggtttaggagcttgtctgaagctggctttgcagagcaatcatgatgcatgtactgatatttaatgttgatatgtagaggtttggagtagaaggtcatgaaataatgaggaacccaaaaccctacccccatattggagctgcagccaataagatcaagtgcagccattgattatggtgccaagaaacc

SEQ ID NO: 10349 - DNA, 389 bp, Homo sapiens
  III.3977 (AI582762)
  misc_feature (349)..(349): n is a, c, g, or t
ctagcgccctccgcgaagtgcctggcaggctcggcagtctgagtgtcgcgttacagagtcccctgggcagtcaccgctgaagggcgggggacgcgggaagggcattttggggacacaggagagctgcgagggcgaagcacgggcgagctgtcgttagggcccaggaaaggcccgttgcggggcgcacaggcgggcaggggaactcgcgccccgcgccgcgcgcccggcctcctgacgccagggccggcttctgagcacagccaccgcggcggccgggggcggccactgctccccgcgagcccgcttccgcgccccagaagcccccagagcccgcgtccgagctccaggnccttgaggagccaggcgggcagctgacagccccggagccg

SEQ ID NO: 10350 - DNA, 155 bp, Homo sapiens
  III.3978 (AI609472)
gagaagacgacagaaggggtgggttgcccatggaaatacccatgggaaggtgtgtgattgaaacctatcaagaatcctatggagaaaaatagaaaaatgaaaaaagaacaaaacaaaacaaaatgaagcaaaaaaaaaaaaaaaagtcgtatcga

SEQ ID NO: 10351 - DNA, 528 bp, Homo sapiens
  III.3979 (AI660869)
  misc_feature (494)..(494): n is a, c, g, or t
tttttttttgtgttccaataaaactttatttataaaaacatgtggccgctgcatttgacctgcgggctgttgtttgcccacctctgccctgggtgtggcctcttttagctctaggtagacccgagcctcaggtgttccttttgctgagcttcagcctgcctgtctttggctcagccaaggtgagggagaagggagcctcccatgggataagagtgagtttctaagattctgttctcccacccccatgtctctcaccagccagtaccctcctcggggggtggctccatgagctctgctttcttggcaggggtcagccacctctcccctctcctcagataggttttagggagactttcctcccattcacctgacagatcatcctctgaaggtgccacgctcagtacctggcacccaggtcaccctcagtaagtggcagctccagtcatatttgcacccttcgactttgcagaggcctcatgtggcctgggaattgngagtctgtataacgtggtggctaagagtgggggc

SEQ ID NO: 10352 - DNA, 378 bp, Homo sapiens
  III.3980 (AI359898)
ttttttttttttttttttttttttttttttttttttttttttggtttaattattttttaaattttaaaaaatttttttttccccccttttcccccccccggcccccccggttggggttggccaaaaaactaaaaattcctttaaaaagagggggcgaattcaaaaaagggagggggggaaagcgcggaaagggaagggggggacccccagggggttttcattacctacccggccgctaaactcccggggcgaggggaggtcgggggggggaaacccaactcctgcccgggaggggtgacactttggaagcccggggggcccgcggccggcccggggaactagggggagggcccggagggcccccgggggggggggggc

SEQ ID NO: 10353 - DNA, 519 bp, Homo sapiens
  III.3981 (AI655095)
tgaaaagtcaatgtattttattgtacttatctttcataatttaaaaacactaattatcatgacaagctttagtcttcaaattcacacagaaagtcaacattagcaaggaaattcttatattttttcatttttcctcattttctgaaactaatcttctgaaaaatacgtctggtgacaagaatcaaaataaacacacattgtcactttgttttcttaacccgacacacgtccacgaacacaaaagctgcaaatgttgacagtgagagctagaactgctgcagaccccaggaggcaggaactggcgagctaggccgcatgggcgcaagaacgcggatgagcggacaccgcaacccggggacaccgccccctagggaataccgcgcccagggacaccgcccccgccgcattacttggttttcgaggcaaatttcttgagccagttcttgcaggagacagcagagcagtgaagtccccgctcgcagcctggaaatagcgcagcatcgcggctacggaacaggg

SEQ ID NO: 10354 - DNA, 334 bp, Homo sapiens
  III.3982 (AI537081)
tttttttttttttttttttttttttttttttttttttttttttttttttttttttttttggccgggggctggcgggcctttatgggggcaaagctgggggcccaaaaaaaaaaggaaaggggcccaagcgggggcccccccggacccccggggcaggagcccccccggggcaggggtcaccggcagccacacccgggggccaccatgtggggcacggggggccccctgatgcccccccccaacaggctgaaaaacaacttgcccccgtaggcggggggcccccaaaagggggggccccccaggggggccccacgggcctgaattttaaaaaaaa

SEQ ID NO: 10355 - DNA, 282 bp, Homo sapiens
  III.3983 (AI287750)
gagaagacgacagaagggttgctgagggcagtcatgccccaagcgcagtgttccttgtgattatctatagtaacatctgaagcctgttgtacaaaggaagcaattatgtgtacctgtgataaatcaagcagctgaccaactgttacctctccctccctgctctttctacctaataaatatgaagggctgtagaagctcagggcccttgcccactagaagcaaggagtcccctgaccccttcctccaaaaaaaaaaaaaaaaaaaaaaaaaaaagtcgtatcg

SEQ ID NO: 10356 - DNA, 489 bp, Homo sapiens
  III.3984 (AI581314)
gcgagttataatttgaagagaattccttgccttcctgattgtctaatgctaaaaaaaaccaatttaaagctagtaacttggacaatttgctttaggagttcaaaccatatgaacatattgaaaatatatatgcaagtattacgagtaagtcaaacattactgtgttctcttttatcagcagctggatccaattctacattgtatattttctctcctctctatacataaaatctatcataaaaaaatgtgaaacagaacagacttagcgaattttgcctcaactctgagaatgttgtctacattttaaacaacaacaacaaaacaccaataagtgacttgccatactgggtttatatctgtggttcaaacagtctctcacatggaattaaaagatgttttgtgggacagattagtaatcctgcattaaaatctcagaaggctagggacagctttcagatcacccaagagcttcttataacatatttatca

SEQ ID NO: 10357 - DNA, 453 bp, Homo sapiens
  III.3985 (W91888)
  misc_feature (371)..(371): n is a, c, g, or t
  misc_feature (389)..(389): n is a, c, g, or t
  misc_feature (409)..(409): n is a, c, g, or t
  misc_feature (431)..(431): n is a, c, g, or t
  misc_feature (441)..(441): n is a, c, g, or t
  misc_feature (450)..(450): n is a, c, g, or t
tggtcttaaactgctgggactccagatgacccagaccacggtcagcaggcagaagcagatgctattgtcaacagaattgccttcaagattccttttctgattgttcattgctgagatgacatctcactatattgcccaggctggtcttgaacttctagcctcaagcaatcctcccacctcagcctctgaacgtactggaattacagatggagcaactgagattcttccccaactacgactataagttctctgagggataacggaacatgtctggtttcctcatctctctgtcacagcaccctgtgaatgcctaagaagacagtaagaatcaacttgaatggttttgtaagaaaagaataacgataccttanctaataggtctaaaaggntttaggtggatggaaatggnagtccactaactttcctctccnggttaacttncaaccctcnatt

SEQ ID NO: 10358 - DNA, 447 bp, Homo sapiens
  III.3986 (W95106)
  misc_feature (273)..(273): n is a, c, g, or t
  misc_feature (328)..(328): n is a, c, g, or t
  misc_feature (340)..(340): n is a, c, g, or t
  misc_feature (361)..(361): n is a, c, g, or t
  misc_feature (373)..(373): n is a, c, g, or t
  misc_feature (384)..(384): n is a, c, g, or t
  misc_feature (398)..(398): n is a, c, g, or t
  misc_feature (405)..(405): n is a, c, g, or t
  misc_feature (421)..(421): n is a, c, g, or t
  misc_feature (442)..(442): n is a, c, g, or t
cacttgaagaccttgatgtttattcatagatgttccatacccctcattgtttaaaaagaaatacataggaagaccacaggcttttattttcaaatattgtaaaatagcaaattagtaccaaggtgatttttttccagccatatagctttttcagcttctccatagtagaaatagatagaaaggccatgctaatctactgcactctgctcatcttcagggaagccgccaagcggccttggggctgccacttgagcaggtgacaaaaggaatggnaaaaaacagaggggcagagttttactcctgaccccactttaatggtcctgggggntaagcgggaacnggggaaagcttaccttaccanaacatgggctcntatttaaaacnaattaggttgaaanaaattgnatttggtcttttcccncccggtgggggggttttggangggaa

SEQ ID NO: 10359 - DNA, 436 bp, Homo sapiens
  III.3987 (AI680178)
tttaacttgtatacagtacagtttcaaacaaaattggggcaactttgtacttcgtaccttattaaaactggggcgaacacagcgtgtttggtttgatcttgtcttcataggatcttctggctgattccttctctggatgagtcctgagaatttctagaatctcgggagagtaaaggagggtctggagccttctctatgtacaaggaaatcccagttttgttaaaaacttgccaaaggcttggtgatataactccaaagacaaatccacagattcctttcaggtacttctttgggattctgtgaagaattgtggctgtacactaggatgtttaataggaaggaagctccttcctttatgacatcaccagacagagaggtagctaaggggattatttgagacactcttagaacaacagccacttttgtgggagcccaa

SEQ ID NO: 10360 - DNA, 480 bp, Homo sapiens
  III.3988 (AI424837)
tttttgcagcaaagagtttaattatcgcagggctagccaagtggaacaagttgggagagggggaagttagttctcaaatctgtcgcccgaaaagttgggagactagggttttgaggataattcggagagcaaggggctagggaattggtgtggctcattagttgtggagaaaatcataagagggttcaaaacaggcctcctggagctgagtcagtttctgggtgacggtcacaggaccgggcagtgccagttctctggtaccagtgaagaagacgtccaggtggcctgaatgactctgcccaattgtaaaagtctgaaaaatacctcaaagaccaatcttaggttttcacaatagtagtgttatctacaggagcaactgagaaattacaaatcactggttattgtttctgtctacattttagcagaattcagttacctcccataatcctaacatttagcctttcattagtcttagaaagt

SEQ ID NO: 10361 - DNA, 393 bp, Homo sapiens
  III.3989 (AI652138)
tttttttttttcaaaatcccaatttctccactttcatacaaatatgtcaatatctccctttttaacatcattcatggagacagctttcttctagagatgtgagaaatacaaatttccattcattttcatgaattcacattttagatataactgctgttttggtgtccagtgggagggagagggacaaaactaaatttctaacatagtgttttgcagagtgtggtccaaagaacctgaatcctgcaagacactctgatttggtttcattctgtgttaaaaaaacatatcatatagcccatttgaatcacagcacacattattttaattttgctataaaaaacacaattttatcccagagtttctcaaggtgactggactatggacactttaaat

SEQ ID NO: 10362 - DNA, 517 bp, Homo sapiens
  III.3990 (AI694299)
ttttaggatgttgtttatattagaaattattcactgtcattcaacaaatatgcacaaagcacccactagataccagggatacatgggcaaacttcctgtttctgaaaatgctgccaagtctcagttcctgagcacttggcgccttttactttgggccctaggtagaaccacagatacaggtagtactgatggacatcttcttgtcatggctgaagttttcccggggaatggttctttgaggagctaccttggctgaggctctcttggttgaatctctaagtacaagagcataagacaaggcttcccgttgagtaatatagccaagcagctgttggtgctgaaggctgtgaatgtagcgggtctgcagggcctcccactggggcctggagttgtaaatcctcataatgctgtaaaagtagcgctgttgcccttggttgagggcctttagtaaggaagtgtcatagatggagggaggaactcgaataaaaggaagttgtggaacattccaaagcttttg

SEQ ID NO: 10363 - DNA, 510 bp, Homo sapiens
  III.3991 (AI692325)
tttattttgcattttcgttaaaagaaagaaaaataaaattaaaactttttcattaatgtgaatctagaaataatttctgctatgagtagaatagcttttatttatgacttcacttgtggtattatctgctgaaagaaagaatgtagcagacaaatgcatatcactatgggaatgaattttaaggaataataataattcttgtctcgcatttctctactaaactataattatgagttaaagcaccaatttgatctatttggcatcttcataaccattttacctattacaagccccctttcaacaatggtatagccatcagtggacattcagtatctagtattcactagatactggtgtattaccccctatcattcatttactgcctttctcctggggctttcaaaagcagttaatcttcattccatccctgtgaacctcttgctagatggagaagctgtgcttgcacggattgaaccacagaattttaaaggcaaaaatatgttacccatt

SEQ ID NO: 10364 - DNA, 377 bp, Homo sapiens
  III.3992 (AI287901)
  misc_feature (182)..(182): n is a, c, g, or t
cattttaggaggtttatttgctaaagttgaggacacgcgtctgtgacacagcctcaggaagtcctgatgacgtgcccagggtggtcgggcgcagcctggtttcatgcattttagggagacaagagacatcaatcaatatatgtgagacgtacattggttccgtccagaaaggtggggacaanctcgagcagggagggggcttcccaaccatttgtctctcgcctacacaggtaggcgagagacaaatggttgcattgttttcagtttctgataagtctctccaaaggaggcatcagaatatgcatctgtctcagtgagcagagggatgactgaatagaacgccaggcagatcggcgctgagcagttcccagcttgaa

SEQ ID NO: 10365 - DNA, 352 bp, Homo sapiens
  III.3993 (R28525)
  misc_feature (2)..(2): n is a, c, g, or t
  misc_feature (267)..(267): n is a, c, g, or t
  misc_feature (307)..(307): n is a, c, g, or t
anattcggaacgaggttttattttatcagggactgcctcaagaagaaaataacataagcttgtgaatggtggagaaaatgccctattttttcttgcaaatacttgtataaagttaacatttgttgatctgatattatcataggtacatgtgtatgtgcgtataaattatatgtgtgtgtgtatatatacattttatatatacattttatatgtatatatacacagtaggattgactatggatctaggaataatgtctcaaatagggnaatgtttaaatactgtgtgtttttatgttttcaacagggntaacatgagacgtgggggcatattgcaatggtggaattaaatccc

SEQ ID NO: 10366 - DNA, 308 bp, Homo sapiens
  III.3994 (R28669)
  misc_feature (113)..(113): n is a, c, g, or t
  misc_feature (145)..(145): n is a, c, g, or t
  misc_feature (268)..(268): n is a, c, g, or t
  misc_feature (283)..(283): n is a, c, g, or t
  misc_feature (300)..(300): n is a, c, g, or t
ataaatgggttccaactgtcaaaatggcagttcaatataaaaaagagtgctctgccaaacaaatattctcccatttgtggaattttatggctcaccaaagaaaaaaaaaagangaaaaaaaaatcccactaaaacagtataattnctgctcttcctatgaaatatattacttggttccctccttcatttaatttttttaggatgtgggatttaattcatcattggcaatatgcccacgtctcatgttatcctgttgaaaacataaaancacacagtatttaancatttcctatttgaggncattattc

SEQ ID NO: 10367 - DNA, 347 bp, Homo sapiens
  III.3995 (AI862574)
ttacttttgctatctttgcacttattttattatttttttctgcctctcttgttttctagcaccaggattgagagctacaaattttcctctgatgactgctttgtccatgtctttcatgacgtggtactctcatggacattcatttttcaatccataactaactgcagttatttagtttttattttcttttttatcttaaggggtgttttaaaatattgaaatagaaccattttgccagccttttgatattaatgcttactttttctgcagtctgttcagaaaaggtggcttatctgattttttgattttggaatttcttaagatgttctctgtgttctaccttagca

SEQ ID NO: 10368 - DNA, 464 bp, Homo sapiens
  III.3996 (AI885491)
attttttttttggcttaaaccagtaaaaatttattttctgacagttctggatgctggaactctgatatcaaggtgtgaaggctctagggaagggtccttctttgcctcttcctagcttaggtggttgcaggcaatattggtccttccttgacttgtagaccatcattcccatcttgcctcccttgccacgcggcactcttcccgtgtttccgcctctatgtccaaatcttatcttttttattttattttattttactttaagttctgggatacactgcagaacgtggtttgttacataggtaaacgtgtgccatggtggtttgctgcacctgtcaacccgtcacctaggtattaagccctgcattagccatttgtcctcatctgcatcccctactcttgagtatacccaaggttaaggcatttagaaaaaaaaaaactttcatgtgaaaaagtctgaagtttca

SEQ ID NO: 10369 - DNA, 485 bp, Homo sapiens
  III.3997 (AA938189)
tttttttttattgtttttctaacattgcaattatgggcaagacattgttctaagtactttacatgtattaacttatttaatcctcgtaacaattctatgaagtaaagtatcattatttccttcatatttttagctgtggaaactaaaagaccagggaagtaactcgtcctagggtacaaaactggtgagtggtaatgtgggatacaaatcctgtccagacccagggtctgcatacctaacaactactgccccattgcagccaaacctatcttaactaaaaatcaaactttttgacccaaggcactaccatcttggaatggacagtgcccacagaccctctattagtcctacctgttcttaatctcatcatatgcaaaatgaggataatggtagtttacttacctcatagggtaggtaaactcctacctcctatgaatacatgtaaagcacttaaacagtgcctggcagttagaaagcattcaaaa

SEQ ID NO: 10370 - DNA, 151 bp, Homo sapiens
  III.3998 (AI383678)
agcaataaagtatttttaattaaggtatgtacaggggtttttagatgtaatggtattgcacacttaatacactatagtgtaacttttacgtgcactgggaaatcaaaaattcctatgacccactttattgcaatatttgttttattgaggt

SEQ ID NO: 10371 - DNA, 656 bp, Homo sapiens
  III.3999 (AI692833)
  misc_feature (7)..(7): n is a, c, g, or t
  misc_feature (67)..(67): n is a, c, g, or t
  misc_feature (80)..(80): n is a, c, g, or t
  misc_feature (95)..(95): n is a, c, g, or t
  misc_feature (131)..(131): n is a, c, g, or t
  misc_feature (139)..(139): n is a, c, g, or t
  misc_feature (140)..(140): n is a, c, g, or t
  misc_feature (149)..(149): n is a, c, g, or t
  misc_feature (150)..(150): n is a, c, g, or t
  misc_feature (158)..(158): n is a, c, g, or t
  misc_feature (159)..(159): n is a, c, g, or t
  misc_feature (233)..(233): n is a, c, g, or t
  misc_feature (243)..(243): n is a, c, g, or t
gtgaatnactatgtaagtttatttcagaaaaatatgaaaactttcctcgatataaaatattttatanactatatacaatnatatttgagaaaccntaacaattcagaccaaaggggaaatgaggtatactnattactannaagacaacnnagtagaannatttaaaaaaagggggtagaattcaaggattaccctaaaggggttaaaaaaaaaactaagggtggaaaagtganggaagacaanaattaacccagacggtcggaaagctacagatacctacattattctagaaattctgatttcctcctagagtcctggcttacaatatttgggaatataggcttcaagaacttgaaatcattactttcagagcctcccgtcagacacacctcgtactggtagctctgggaaagggtcccggtgccgctcacgttcaccagatgccctggaaaggggccctcgggcaccgagcagcgacccactgaggccgccctgctccttctgcacagccgcactgtcacgaacaggaacaccgagaagaggaagagcgaagacaccgaggccaatgccaccaccaggtagacggtaagcgagtcggactgggcttgggccggggccgcctctgggagcggcagggtaggctgagagaagccgtc

SEQ ID NO: 10372 - DNA, 462 bp, Homo sapiens
  III.4000 (AA830789)
ttttttttttttaaacaaagggaatttattgtgggaaatgcttcacaggtgatgaacagcagagacccaatcatcatggaagcagcccagagatgagtcacagcaggaagccactccaccatcagggctgcagaaagtggcattgggagagggcagaggatgggcacttggtggcagctagaatcatggaggagatgcagctactgatgcaaaactgcttcctgaaggagagagatggtcaagtaccctgccttatcccttcttttcactaccctgtctcttgctggtgtctcccaccggccatatccagctggaagccaattgccaatggaaccatggacaggaaatggatctgagtagatggacaatgaccaccacacagcatgatctcgactagataaacatgatgcatgttaaatggtattacttctgctgacagggcgatatatggcttttagtttc

SEQ ID NO: 10373 - DNA, 392 bp, Homo sapiens
  III.4001 (AI475454)
  misc_feature (294)..(294): n is a, c, g, or t
ttttttttttttttttttttttttttttttttttttttttttttttttttttttttttttttttttttttttttgggccaaaaaaaaaagaaacccggccccccaaagggggggggggggggggggcccccaaaaaaccccccccgggtaaggggggggcccccaacaaaaaaaaccttcccccccaaaacaaaggcccccaaaaacaaaaaaaatataaaaacccccgggggaaaaaaaaaaaaggcccccccaaaaaaaaggaggttccaggggggggaccccccggggaanccccaaaacccccgggccccccccgaaggccccaaaaaggggggggggaaaaaaggtaaattcccccccataaaaaaaaaaggaaaagggatttgggg

SEQ ID NO: 10374 - DNA, 449 bp, Homo sapiens
  III.4002 (AI573096)
caccatctaacaaaggcactttattgcattaccattcacaattaacagtcaagaacaaataataataacaaataaaataacttttaagaggacaaggcattagaaataaaaaaggacactaataacatttgtaaaagcttgtactggatgtggttgcccccatttgtgtgtgtggttgtgtgtgtgtggttgtgtgttggtggccacagctgagcctctgtcaccagagaaggctgaggccccaatggcacacctcagaaacctacaccccgaggctgggcggctggactcctgagcacaagctccctctcgcaccctttgccagacagtttgtctccaatttcaaactgacctaaggctcttactcctggattttttgtttttaaaccttctcccagccagtcttcgggagggcatgattagagaagtgctcctttgctgatggagga

SEQ ID NO: 10375 - DNA, 484 bp, Homo sapiens
  III.4003 (AI683338)
tttggttgatgaaatgccagggtgaaagggatagccaaatggactaaagcacaagtgccacactagttatttggcagagtgcccagtaaaggtccaccacaataccaccacacatccactcggggatgaacaagggctgactgattgataagctcttgaaaattcttaagctcactgcatcccttcaggtctccaaggaatactaagtttcctctctgccgtgagagacacgaagtgaacttagtgttgggagacagaagctgcatggcccttgggggctgacccgcagagactttgggatatagcagagagagcttggcatgacttattactccaggctgtagaatcctggaaaagagctaccatgcagtccacgcctggtcgactagaggaccaccttagtggaagggggacaatcagggcctctggcctgccatgtgcacaagcataacaattgcttttgtttaatgtgcagatggaatat

SEQ ID NO: 10376 - DNA, 429 bp, Homo sapiens
  III.4004 (AI935018)
ttttgtgtttttggaagactacagtttgctttattcagaaataaaatatgttccaaaattccaaaggaatattccaaaatatgccaaacctctctcaacctctcttttcccccacccttccaatgagttagtttggattttgaaatatattgacatgtagccagaagcctggtgattttacctgggaaataaattctttatcacttcacttttctttctgataccgcactatgcttgagaggatgaccagctgcccatccaaaacagacaaggcaaaggtctctgggccccagggtgatgagtttgcctttcccccagggttgctgtggctctcagaaggcagcagagactggtgggtggacagtcatatgctgtgaggttggtcactggccccactggtcccaggactcaatcacataatcaggtgag

SEQ ID NO: 10377 - DNA, 505 bp, Homo sapiens
  III.4005 (AI812063)
  misc_feature (426)..(426): n is a, c, g, or t
tttgtaaggtatgtttttattttacaaaaaaaaaaagtgacatgcaataacccatcttctaacaaactattaacgcttggattacagggtaaaaaggaaatccaaccagccctgatgaaaaaaaattcgatttcacaaagctgaaaaaatctattacaaagtttctgttgtataaatatagtcagtcttatctttaatgtagtcagacaaaaaaaagttttgttggcactaaaacaaaaacaaaagcaaaaaccctactgcttgaatacaccacaatcttcatttgtattcccagccaaatacagatgatgtctatagcatgacagttactgcatgttccaggactcaaggtaaccaaatgagatttaaacattttatcatactccctctaccaacaacagcttggacagaccactttagccctgngtcaaggactaaagcctttgttcatagaaaattgaacatgtaggccaggcacggtggcttacacctgtaatcccagcac

SEQ ID NO: 10378 - DNA, 471 bp, Homo sapiens
  III.4006 (AI424959)
ggaaccaagaatgcatcttgtcttgttcttgcagcccggcatgccagtgcttcctccacggtaaggtttggaaaagaagactaagaataagaatcattgcggccagcctgaccttggggcagaggatttggcaaccacctggcctcttattatcctgagtatttcctggaagtgtttgttactattgttattgttatagctgctattattattatattactatttaacaaataatttactcagtggtatagtgagatgggaatatcaatacatttgcctaattcttttaaatgttttaagtagtgtaaaatatacataacataaaatttaccattttaatcatttttaagtatatggtttagtggcagtagatatgtttacattattgtgcaaccatccatctccagaacttttgtctgcccaaaccgagaaactgttcccattaaacattaactcctcattccttcttcc

SEQ ID NO: 10379 - DNA, 344 bp, Homo sapiens
  III.4007 (AI674472)
agtgttttttttttttttttttacattcatgttaatagatttattataaggaactggctcacatgatggcagaggctgtgtggttccacagatctgctgatctgattttgcagacctgctgtctgcaagctggaggcccaggaaaggtccacagatggtgtagattccagtctgtgtctgaggcctgagaaccagaagtgccaagaggaggaggagatcaatgttcagctcaagcaatcaggcagaggggacaaattctcccttccttcttcttggcttctggtccgggcctcaaaggattggatgatacccaactgcattggtcagggcaatcttgactcagt

SEQ ID NO: 10380 - DNA, 311 bp, Homo sapiens
  III.4008 (AI565965)
taaaggtttcaaaaatgtttaatagaatcacaacttattgctgtgatataatttgattttgtattgtcatgtataaccttcaaaagtcattttctgttcatatagtaatgaatcaaattatgttggatcaaaaattatcagaagattttttggtattaataaaccatacatataataaaaatattcaacatgttttaagatggcatttaaatagtaacagtacgtaggcaatgtaacatgatgttctgtaaaactaacatgacaaaataggattaattgtggtttatggatttccatttaatataaacctt

SEQ ID NO: 10381 - DNA, 546 bp, Homo sapiens
  III.4009 (AI889995)
  misc_feature (396)..(396): n is a, c, g, or t
  misc_feature (472)..(472): n is a, c, g, or t
taaaatcacaaataatttattcttccgttagagttgatacagttttaaatagcaacaaagtacacagtggtggaaaattggcacagaacctacaagcatttcaatcacaataaggctgtccatgatttatctgttcaaacttgatgtccattttctactgatcaagttgaaagaaaaaacctattctggccaggcacggtggctcacgcctgtaatcccagcactttggaaggccgaggcgggtggatcacctgaggtcaggagttcgagaccagcctggccaacatggcgaaacctcgtctctactaaaagtacaaaaattagctgggtgtggtggcgggtgcctgtcatcccagctactcaggaggctgaggcaggagaactgcttgaacctgngaggcggaggttgcagtgagctgagattgcgccactgcactccagcctgggcgacaagagcaagactccatctcanaaaaaaaaaacaaagaacaaaaaacaaaaacaaaaaaacctgttctgaccttgaaacacacaaacacacactct

SEQ ID NO: 10382 - DNA, 444 bp, Homo sapiens
  III.4010 (AI806708)
  misc_feature (13)..(13): n is a, c, g, or t
  misc_feature (229)..(229): n is a, c, g, or t
ttaaaaaaaatantaaatcctaatatgtaatctcaaaagggtacattcgcagagtttttagaaggggtgggaagatctactgtcctcgaagtacctgtgcaggaacatgcaacacaggaaacacacatttcatctcctgttgagtctccttcccaaaaaagcaaaagtgaatacctaattataaagccctgaaaactatactagacttgtatgtacagctgtgaaaatntcaagtctaatatgttttatcctatactccatatttcatccttttataagagcttatcttagggcttctcagccctgagatacagtagtgagcaaagcagataactatacctgccataatgaagtttatatggagtatatatttcttaaatgtgtttttttcttaaatgtgttttttcccagctttactgaagtatacttggaaaataaaaattt

SEQ ID NO: 10383 - DNA, 452 bp, Homo sapiens
  III.4011 (AI360969)
acttatttatttttatttttttgggacagggtctggctctgtctctgtccaggctggagttccgtggtgcaatctcaacacactacaatctctgccttctgggttcaagcgatgggattttggtgtgagctatttttaatcttataatggaaaaagtgggagaaatttatattacaaagcgatatgattatagtataagaactgtggcaatatttgactgaattgtccccttcctcctcctagaaattatgcaaagtgatagggagatatggtggtgagcgggggaatgaggcagaaatcccatattcaacgaaactagaagacaaaaagacactggaaactccaagacctgcacaaggcctaccaaagttacatgggaagaggcacatgcagatcccggaaaacaccagcaaaaacagactctctgaagatgagctgttcatgacacagtg

SEQ ID NO: 10384 - DNA, 310 bp, Homo sapiens
  III.4012 (AI566316)
ttttttcacctaggatgtttgtttattagacagatagaaactgcggaagccccactccagatctctcaaatcgaaatctccagggctaagggtaaagacacacctgtatcttcagcctcctagccaggtttagttgctgctggactaacacaagatgtactccctattccaaaacacctctgctaatatcctccccttggcccactcccaaagagccttgttccttctcaccaagcacatcctgggggctgctggggaactgcttgttgagcacagtctccagggcatagctcaggtccatgctgtgctt

SEQ ID NO: 10385 - DNA, 389 bp, Homo sapiens
  III.4013 (AI688791)
ttttccttgttcacaaatatgcattttattttgtaattattacccacagattgccattaaacgttatgtccagtaaggacttccctaggtgagtctgacatcttttaagccagcttattttttaatactgttattcaccacataatttacaaacagagaagaaaggaccttcatacaccttaagaaaaatgaagtgtcaaattactacagtcagccctccgtatctgtgggttccacttcttcagattcaactaatcttagatagaaaatttggggggaaaaaaaacaaaaaataatacaaatttaaaaatcggtacagtataacaactccttacatggcatttacattgtatgaggtattaccagcaatctagagatgatctttttgt

SEQ ID NO: 10386 - DNA, 301 bp, Homo sapiens
  III.4014 (AI382809)
  misc_feature (269)..(269): n is a, c, g, or t
gcttctttatgttgatttttaaataatggatgttttagttgtataatttttaaattgttaagtggaaagttttcttaacctctaatggcaaatttgggttatatgcagcaggaatttccttaaccagtgtagccacacagtataacaagcatattactcttatgtgcactgactgctctcatttctcctatttttacctctctctatccagcctttttcttttactgatacatgatattttacatatttatgggtacatgtatttgttncacgtataaaatgtataataatgtcagagtat

SEQ ID NO: 10387 - DNA, 458 bp, Homo sapiens
  III.4015 (AI656778)
  misc_feature (411)..(411): n is a, c, g, or t
ctggatagctttattgaagtgtcgtgtacaaagcatacatttcatgcacttaaaatgattaaaaatcaatgatgtttagtatattcgcagagttacaaccatcaccactactgaaatttagaaagttttcatcacgacacaaagtaacgttctatcagttagaggtcatctcctatttcaacctccctcagacattggcaaccactattctactttctgtctccatgggtttgactgttcttggtacttcctataagctgactcacataacatgcaacttttagaaaggctgaaaaccacaaataccatgttgagcaaaatgagcccgacacaaatgctaggatgtctgtactttagtaaattggtgtatcctgtttcaataattgatttagaattttcttattagagcanataacataattcattttaagattatgcaatataatatatttcttttt

SEQ ID NO: 10388 - DNA, 551 bp, Homo sapiens
  III.4016 (AI768230)
tcttgccttattactttatttgggattttcagtagtgtgttgaataaaagtggtgaaagtgcctgcacttgcattgtttacaaacttaagtgtaaagtattcagacttttactattaaccatgttactgttacaaagtacatgtacaaagtacaaaaagctgtggtctttttgtaaatgtcctttattatattgaggaagttatcctctattcctagtttggctagagtttttatcataaatgggtgttgaattatgtcacatgccttttttggcataaattgatgaaatcatgcaatttttttactttagccctgtaaatgcagggttttattaaagtgacaaatttttgaatattcaaacagccttgcatccctgaaataaactccagttggtgtatgtgtgtatatatgtgtgtatatacatatgtatggatgtacatttatatattgctagattccatttgctaactttttttgaggttttatttcatctgtgttcataagggatattggtctgtagttttctctttgtttgtactggatttgtctt

SEQ ID NO: 10389 - DNA, 245 bp, Homo sapiens
  III.4017 (AI611341)
tttttgggcggaataacgacagctaatatttatttatcatgtgccaggcacaatgctaagagcattgcaggtattaaatcatttaatccaatagaagaaataagacgtagtgtttcatagatcactagggtgattatagtttagaataacctattgtatatttcaaaatagctaagagaataatacaaatgtttccagcaaaaaggaaggacaagtatttaaggtggtggctgtcccctcgtgcc

SEQ ID NO: 10390 - DNA, 368 bp, Homo sapiens
  III.4018 (AI572781)
ttatttacagcagtatttttattattacacaaaagtataaaaaatacaaatatccatcaataggataaacagcaatatattcttaaaatggaatagtatgcaaaatgaaaatacactactgccacatgcaataatgtacagatcttaaaaaattgagtgaaataagcaagacacaaaataattcatgatgtctgataaaatatatatttataaaattgaaaacatgcaaaaactacgttttgatgttataggctacggaagtggaaactcttaggtaagtaacaactaactgctttttattacagagtgcaatgagaaatatagttcataaatattttctcttatggagattaatacttataatcatt

SEQ ID NO: 10391 - DNA, 200 bp, Homo sapiens
  III.4019 (AI918620)
  misc_feature (72)..(72): n is a, c, g, or t
  misc_feature (73)..(73): n is a, c, g, or t
  misc_feature (74)..(74): n is a, c, g, or t
  misc_feature (75)..(75): n is a, c, g, or t
  misc_feature (76)..(76): n is a, c, g, or t
  misc_feature (77)..(77): n is a, c, g, or t
  misc_feature (78)..(78): n is a, c, g, or t
  misc_feature (79)..(79): n is a, c, g, or t
  misc_feature (80)..(80): n is a, c, g, or t
gaagtgagaacactttaatggatctgaggtctgtccatctcttctctctcctcttccttaatttttgaaccnnnnnnnnnccactcagggctgacacagggatgggctggggatgaccctaggccacatgcgcaggataaaaggggccgtgcaaaatcctgttctggccaccagatcactcctagaaagttgggtggggg

SEQ ID NO: 10392 - DNA, 308 bp, Homo sapiens
  III.4020 (AI270357)
acggtttttatttcctgaatgttctggtatatcagagttaacatgaaataaaaaccgtttcatatttctgccattattatggtcactgctatgggggaaaagtgacagggagtcaatgctctttctgaatttgcactcgaataaaatctaaacttaaactaccattaatacttcatattccaaaatctggccccaagctctttccagccttatttttatcattctcctaccaaaccagactgttccccaaatgctgtcttctttcctgccttcttattttctcagatgtcaactaaacagtctttttc

SEQ ID NO: 10393 - DNA, 453 bp, Homo sapiens
  III.4021 (AI913776)
gccttttgcctatctctttcatttaatcagtcctggatatctgaaatatcaaaatgattctcagttggcccagacacctcacacatcatccagtgccctcacactttgaaggtgctcaatcagtgtttattcattggctgacccatgatatagaaattcacactactcagggttcctttccaaagtcttatacaagcaaaatgttgtggcaaaacattcacccaacattacaattcaaatattccagaaacctgtaagcatgctgtcttatgatctcattattgggtctcaatttaagtactgcttcctcaggggaaacttcatggactatccccagccacacctgcccccagcgccaggcctccagcctgattcacaacacttacacaattgtttgtatcaggtctgtctttccactgaccgtgtaccccaccaggcagcagcatgctgtct

SEQ ID NO: 10394 - DNA, 345 bp, Homo sapiens
  III.4022 (AI453326)
  misc_feature (273)..(273): n is a, c, g, or t
aaaatggacttgaattttaatttttttaaagattatctatatatatattaataaaaagtgcaaagaatagaccttcatgtttaaattatattctaaataaaatatatatatatatgtatatatatttccattaactgcgggagacaactggcaagtaaagagcctgagagagtccagtccctctccaccactacaatggacatatatttcaaggaagcacctatgaaaaatagtagagtgttcacaacacatctggtaacacagatagctttntggtgttcttgagagcagtttgtttgcattttcaatatgacatgaaatgaagggaaaaatcaaattcacaaa

SEQ ID NO: 10395 - DNA, 397 bp, Homo sapiens
  III.4023 (AI800382)
tttttttttttttttttttttttttttttttttttttttttttttttttttttttttttttttttttttttttttttttttggggggggaaaaaaaaaaaaaaggggaacaaacccttaaaaaaagggttaaaatttggccccccaaattaaaggggggaaacaaaggaaactttaaaacccccaaaaaagggttttcaaaaaattgggtttccccccccaaaaacctgggggggaaagggaaagggggtaaaagaatcccgggacaaccccaaaaaaacccccccttttttaccccggggaaattcccccggaagggggtttttcctttaaatttgggcccccccccttgaaaacccccctgggggtttattggggcccccaacaagggggggggg

SEQ ID NO: 10396 - DNA, 176 bp, Homo sapiens
  III.4024 (AI925402)
tttttttttttttttttttttttttttttttttttttttttttttttttttttaacacagggttctttttattgggaagcccaggggaaaacatttggaaaccagcttactggaggggggacagctgcaacccatgctaaggcccttttattataaaaaaaagggggggggggggg

SEQ ID NO: 10397 - DNA, 345 bp, Homo sapiens
  III.4025 (AI475175)
tttttttttttttttttttttttttttttttttttttttttttttttttttttttttttttttttttttaaagggggcccaaaaatcggggccaaaatttggggcaagggggtccccaaaaaaaggcccggttttaaaaaacaaaaacctaaaaccgcccccccccaaaaaaaaaacccaagggggcccaaaaaaatttccctttccctttggggggtttcccaagcctgggttaaaaaaaccccgcttttccccccaaacctaaaggggccatggaaaaaaaacggttgggaacccgttctcccccccctttaaaaaagggggggggggggtttaggggaaaaa

SEQ ID NO: 10398 - DNA, 367 bp, Homo sapiens
  III.4026 (AI471925)
tttaagttatcaaaagcttttaattgtcctacaaatataattaaaatttaggaatcacttttgatttgggcaaagaataaaatgtaaagagaaatgtaaagaggtttacaaaagaatgaatacaaataaaatggacccttagaagaataaatattttcacttaaaacaggacataaaaaagcctaattttgaatgtctttgaagaaccttcagatcattccagatgtaaaatttgtgtaggagattgaaagcatagccttttctactcattttaacagatattcatttcctttgaagtgatatattttaaggtcttcatatcaagaaacatgctgcaattagctaggagcaaatagcattcacttaa

SEQ ID NO: 10399 - DNA, 503 bp, Homo sapiens
  III.4027 (AI673255)
gtgtggggaccgggcgtccgcttcctgggagccccggcctcctccgcagggctgggcgcctggttatggcagggcctcaccagggcgaagggaaggctccgcgcgccccgcacgcggggaccccccagcgcagatcccggatccgcgcggcccacgggcctcagcccaccggcttgaccttcgcgatgaagagcgcggcggccctctccagaaactcctcgcgggtcatgggcgcgctgggccgccgccccccgacggggccgttcagcgccagcgccaggctgtcgggccccaagcgcgagccggcctccaggaagcgcgcgggcgcggcggcgtcgctggcctgcagcgcgccctccagggtgtccagcacggcctggcccacgcggcggtcggccacggcggcggccgagtcctccagcagctggaagagcgcgccggcgcgcgccacgaactccagcagcacgaagcacgtgagtgtgcccgcgcggaagacgctcagc

SEQ ID NO: 10400 - DNA, 447 bp, Homo sapiens
  III.4028 (AI916524)
tttttaatttgtgcttttataccctccctaaatcaatgtagtacacagcaaatgccaggtgaatgtaggtgttcctattgccatagtgagttcctaccttcccccaaagataatggccctgagttggtacaggaagtcttggctgcactttccctagtaatctacccacccccactgctagcggctgcatttcactgactcatagtttccaagtatgatcagcatgctaacaggaaagatacagtcactgggcaaagcagcagccctggagcgctggccaaggcctatccaataactgccaccattgatggcaaaaaggaaataaggaacacaacaacaatgacacaaaaacctagagtacaggaacgttttaagaatcaaacccctgctgtttgtcgtttcttcagcacacccagtgcttcccagtacacaacaaactggatgggg

SEQ ID NO: 10401 - DNA, 216 bp, Homo sapiens
  III.4029 (AI886494)
tttattctaatcatctatcccaaaatgccaagacatataaattcttgggctctcctctagccctgtccaattgggaattctgagggtggggcccaacagctagggtattaacaagccctccaggagattctcatacacactaaaggctgtaaaccctagtgcgaggtgcaacattaagccccttataattcatgctcaacagttctatagggaggt

SEQ ID NO: 10402 - DNA, 481 bp, Homo sapiens
  III.4030 (AI472063)
ttttttttttttttttttttggtgcatattaactaaaccagtttctaacaatttggcaacagcaaaaagagatggttccttattatttccataggccatatccattgcttctagagacaaggagcaaagtgcatttattaaatgatgcagtgatacatcatcaagatactgtgagctttcaaacaatcttgaaagtatattggaaatcactggtaaatctgtcatcactgctgttgttagaactgtactgggtccttctacagctctcccaggtttcaaggcaccgccactactaggctttaatcccagaatccacacaagatgctgaagagttgccaagacaagttgccatgatgttccaagaacagccccatggcaatgcgccaagttaagtaaagtcctcatacactggatatttttggaagtcagcattactgtcccttgaggctggactgctaaaggttgacccactgccacaact

SEQ ID NO: 10403 - DNA, 448 bp, Homo sapiens
  III.4031 (AI492612)
  misc_feature (448)..(448): n is a, c, g, or t
cacaatataaaatactctttattttcatgtttttgagagcaatgaacacacaaaatataatctctggaggagactaaaattcttttttcaatccaccgttttctaaggcttcacatctctagtccaacttcattggatcacagataatcccccgccaactgagcatggtggctcacgcttgtaatcccaggactttgggaggccgaggagggccaatcacttgagtccaggagttcgagaccagcctgggctactgaaacccatctctggaaacactctgtggtgctctagattgttacaaagttcggggtggtgcagccccagcgcgccccgctccccggcctgcaggtggcatacaagtctcttcgctgtcgggattcgggactgaatctctgccgggcggcaaccccttcccccaccgggatcaccgggaaagtggcaccatggn

SEQ ID NO: 10404 - DNA, 390 bp, Homo sapiens
  III.4032 (AI250699)
tatttgacaaaattcaatatctatttattataaaaatctctcaacaacaaagaatagaagggaattttcaacctgatatagcatctaagataattcacagttaacatcacagttaaaatacattttacatcataacatttacatcatacatgtaaatgacctaatgccttttttcctaagattaggactaaagcacaaatatctgctttatctacctttattcaacgtattactggaagttctagccagtgaaataaataaaggtaacagaatataagttgaaaagaaagaagtaaaactgtctatattctcagaagatatgatcatctatgtagaaaatcttaaagaatctacgaaaaactactagaactgaagtagggagtttagcaa

SEQ ID NO: 10405 - DNA, 303 bp, Homo sapiens
  III.4033 (AI686088)
atcccccgcaaacaccacatttatcaaacttctttttggagtctatgatgcgatcacaaccagcttttacacactgtccttgcacacagacagaggtggaatctgggctacatggagtaccatctacaaccttgggctgcaaaacgaagaagtagccaatgcctttggcttggcagatgagcttgcacctgtcctttggtgagacgccagcgtacttgggaatccattccaccgcaggcccactcccaaaggaagcttttgaaaactcgtgtgtgcttcacattggtcctctcttaaggtttt

SEQ ID NO: 10406 - DNA, 522 bp, Homo sapiens
  III.4034 (AI431620)
gtttttttttttcttgtttactgatatttttattgaggtttgtagctcatgactttacatgtgattgtacagagcatttaaggaaaaaaaaaggatgtaaaggttgtacaagggaaatatccaatagcttgaaatctggtaggtgtatatgaaaagaataatgccatgtgtaaatatatgagaatcctaagcgaccaaagccacaatagctatattcttgtttctaaaaagtgactttcttatcaacaaggaataacacaattagttgttagttttaaaaataaactattgttttttagaaagacatattttgaattagatttaatgcttggtgagggggaaaacagtatggaaaaagttccaagttatccatccacttccaatgcatttgcaggaattaaatgaaggcaaatcaacctgactctacaaatcttgattttctagttcacaggcaaaggtcagcattaaaatatacaaaccagtgatactttataaatgaacacattctgattgtctatagtg

SEQ ID NO: 10407 - DNA, 413 bp, Homo sapiens
  III.4035 (AI355439)
ttaggtaataaaatttattttttcttctgaagtttatattttcttttattgttatgtgactttttctgtgatatatttatgtgcagattgcttttagttatccttgttgacaattacttaatgggccttctcaatctgaagactcatggctttcttcattcctgggtgatggtctggggcagtaatgattttaggcttgggcaagaagacacattgtgccctacactataaaaattttcactaaacattttctctagctgtgtttttacaacaaaaagaaggctgcacttgcccacttgggggctacactccacctctagatcacactttcagatcacaaatttagatcacacttcagggttcctgggaaccttacatttccatttcaaatagccccagcatacttttgggat

SEQ ID NO: 10408 - DNA, 59 bp, Homo sapiens
  III.4036 (AI273947)
tttttgacaggaggaaaaaaaatttaataatatatgtttgcacaggagttccacgaaat

SEQ ID NO: 10409 - DNA, 346 bp, Homo sapiens
  III.4037 (AI659592)
tcaaagaattaatgaaaatttattatagaacaaaatagagcaacaaagaagtccttggatagtaaaaatatccattcaaaccccagtcaagtgacaggcaactcaggcaaccttatccccctccaagaagagtgttttccccattcccagaaggacaccagtgccaggctgctcctgagtctcagcaaagccatctgtcttctttggagtgtccacattcagaacaagccgctgaccccagaacccgatggatccctgcacacacaccaccatgcacgggtgggtctgatttggacggcaccatcgctcgcaaatcacatgccacacaaggaaaacacgaaagctt

SEQ ID NO: 10410 - DNA, 478 bp, Homo sapiens
  III.4038 (AI911707)
ttttttcatttttaatgtgcatttttaaaagaaggacccatgccggtttcctcttcctactggctgacatttaagggcaggtgaggctgtgcctggctggttatccttaatgacctgccttgctcctttcctcctgagaacactcctgctatgtaagccccgggacttgacaggttggttcctgcccccttgtggtccagagtgttcatggttatggtgagacctgcagtcttcagtctatctggtggttcaactcactgaaaatgttggtatttgccatgtgtgttccacggaatcttattggcctctgtagtatataagaggaaatgcagccggacagaacaagcttgcagaccccatgtggcaaacatgggaggcactgtagacatgaggattaattagactcataccctgccctcaagaaactcataattcagaggagattcagagatcaaccatctccactcatcaattcagt

SEQ ID NO: 10411 - DNA, 495 bp, Homo sapiens
  III.4039 (AI669594)
aataacagagatggagtcttgctatgtcgaccaggctggtctcaacctcctgggctcaagtgatcctctgtctcagcctcccaaagtgctgggattacaggcgtgagccactgtgcccagcccaggttgcctattcttgcgggtctaaggtctgtgtggaaatgccagctgttctctaccctcagaggtctctgggaaaaggcatctgcttcccctgctctggactcttccagggctctgtggactgaggagaaggtgagcctagatctcctggccctggtggctccccaaccccatcactgaccactgcattccagcccaggaggccctgaagccagccagagcctccaacaactcaccaatgaagtcactgaaacacttgggcttgtgttgccagtaaacacccaggaaatagacaggcactcctgtcagcatgatggccaggccaatgccacacaccaccggctctgaccacaggctgaagaccagcaggaa

SEQ ID NO: 10412 - DNA, 533 bp, Homo sapiens
  III.4040 (AI394009)
ttttttttttttactttgttgcagtagtttattttaaaatacaaatgaagcatctattgcaaaacatttatttatcagagtaacattttccagtggggtgtatagtgtatttataaatcattaacaaagaaaataataaacattttgatattttgattatttcaagtagagtctatggagttattttattttacgtatcaaaagactttaaaggatgagatttcctccactgcatacttacactattccagatgctgacaacaacatctgggcattctatcatgagctgattttctgaatgaagtaatttaattgttgattgacaagctaacatgatttaagacacagccacaccgtattcaatagcagtgtcaaaagtcataaactgcaagcatatgcaagcaagtggggccatgatactaacttatgttgccttttgaaacattcatgctaaatttaaattacaggctaaagtttagaaatgctggaagaggaaatgaagaactgcagttacataatttctgggatctctg

SEQ ID NO: 10413 - DNA, 395 bp, Homo sapiens
  III.4041 (AI702905)
atatttatcggatttatttgcccaattctctattgatggacatttaaatttttttcacattttgcaataacgcaacagtgaatctgtataattctgatgaaattccttaaagttgaatttttcagtcaaaaagtatacacattaaaaccaataaaagtatacaaattaaaactccaataaaagtatacaaattaaaactccaatagaagtgtacaaattaaaactccagtaaaagttacagattaaaactacaatggctgtatttccaagctgccctcaaaaacccaacccagttcaggcccacacagaatacaaacagcccctttttcccacaccctcaacaagcctgaacagcatccacgtctccggctcctgccatcctgctgagcagcagg

SEQ ID NO: 10414 - DNA, 569 bp, Homo sapiens
  III.4042 (AI651282)
  misc_feature (526)..(526): n is a, c, g, or t
tttgggttcactcagtcttgtttattttttctcagagaacgctctcctctgagcagatacacttactaagcctctgttaattctttctctgaaactaaacgaaatggactcagaccaggcctaggttgcagtcgcccgggctctgttctgagaatgtgcactggcaggggctggctctgcatggggaccgggtactcggcggtgcccgcgcgccacctactggacagtctctttcagttcagcagcagcctgagagcgggggtccaggaggctggcaacagatccctgcatttggggaccaccgaaagttccgtgaacaatgctaggcccaactccccatccccccacccccataggctgtggccggcagaatgcatggtcctgagatgagacagagaagtcaggcctgaggtcagtgatcctggggagactgtagagtatctgctgagtgcagtcctccccgacctcctctgggaagcccttctgcatctcagggcacccttcctctaaggaaaagcagagactntgtctgtgagcccatagttcttcttggtccctcttaccaccag

SEQ ID NO: 10415 - DNA, 434 bp, Homo sapiens
  III.4043 (AI889396)
tttttttttttttttttttttttttttttttttttggaaaaaaagggtctatttgttgcccaccctggtcttgaactcctggcttcaagtgatcttcctgccttggccttccaaagggctggggttacaggcatgaacccccacaccaggccaaccctgggggggtttaaatatgtttaaaattaatttaaatggcaacaatgaaatcaacaataaaatctgtgtctgggtgggggtagggaaatgggtttaaagattttttcaaaaaggggtaaaagtggtaatttgtattaggggttggcaattcaaggatttatgttgtaatttttggtaaccactcaaagaatagtattgtcccaatctaaaaaagggacaaattctgtttattaaaaagttcctccaaagaaggaaagaaaaattctggggagggcaaa

SEQ ID NO: 10416 - DNA, 450 bp, Homo sapiens
  III.4044 (AI655190)
attcagatgaagatgtggcccccagttccctgcgctctgcgctccgatcccagcgaggtcgagcgccccgaggtcggggtcgcaagcataagacgaccccccttcctcctcctcgcctagcagatgtggctcctacccccccaaagacccctgcccggaaacggggtgaggaaggcacagaacggatggtgcaggcactgactgaacttctccggcgggcccaggcaccccaagcaccccggagccgggcatgtgagccctccaccccccggcggtctcggggacggcccccaggacggccagcaggcccctgcaggaggaagcagcaagcagtagtggtggcagaagcagctgtgacaatccccaaacctgagcccccacctcctgtggttccagtgaaacatcagactggcagctggaaatgcaaggaggggcccggtccaggacctg

SEQ ID NO: 10417 - DNA, 356 bp, Homo sapiens
  III.4045 (N90523)
  misc_feature (332)..(332): n is a, c, g, or t
ccttgtaaataaggtttttaataaattacaaatatgtaataggtttttatccatcttcttcctaactactcaatgcattgttgcatagcacagttttttttctgcttcttctttgttggaagtctgagagtctgaaatctgcattggcttggttgagcttgggaatttttctggtaccaggggtgcaaatatccattgtagaagtcagtagctgttagtgatttcttgagcatcactgatcgaacaccaatccaaccatccttgcaataaaccaatagtatttgtgactgtttgtggtatattactgatcccggaataagagcctgtccccntaattttggatcagcaaggactga

SEQ ID NO: 10418 - DNA, 259 bp, Homo sapiens
  III.4046 (W20101)
aaggactgccagtgaagcaatatgctgtgagtctcagcttcccgtatatgagtggccggatgtgggatctggagaatatgatgttggagtagtggcttcgtttggccgacttttgaatgaggctcttattcttaaatttccctatggcatattgaatgttcatcccagttgcctcccgagatggcgtggcccagcccctgtaatccatacagtgcttcacggagacacagttactggagtaacaattatgcaaattaga

SEQ ID NO: 10419 - DNA, 218 bp, Homo sapiens
  III.4047 (AA831893)
tttttttttttttttggtggtggtggccctcttggtgcaggccatataccaggactcattccccctggttgtgtaaatggagggctcagagttccttgatcttcagtgaactggggtaatgagttaggattataatggtgaggagggggtgcagttacaggtggaccaccatgttgaggtgggggaggtcctggaggaggatgattcatataaggtgg

SEQ ID NO: 10420 - DNA, 432 bp, Homo sapiens
  III.4048 (AI816189)
  misc_feature (386)..(386): n is a, c, g, or t
ggggcccccagacgaacttgcagcggggccggaagtgctcccaggcgaagtgcaccagctggcggcgctggtgtcggcagcgcacggcgaacatgaagtagtccagggcactctgccgcacccccggcagctcccgccgcaccagcgtctcctccaggaagaagcggaccagcggcgcctggaagtgctcgaggcccagctcacccagcgacttgaggatgcgtgtgatgcggaggttgttgtggctgcgccagttcaggttctggaagcgcttctggtagttctgtgcacggcccaccgtgcccgtgcctcggtcctccagccggatcccgtagaagcccagcatgagctcgtaggcccggacaagccgctcctggatctcctgngagcttttaaacacctcgacctccctgagcgtgaggggcttggcat

SEQ ID NO: 10421 - DNA, 400 bp, Homo sapiens
  III.4049 (AI816230)
gccgccgagcatggacgaccccgactgcgactccacctgggaggaggacgaggaggatgcggaggacgcggaggacgaggactgcgaggacggcgaggccgccggcgcgagggacgcggacgcaggggacgaggacgaggagtcggaggagccgcgggcggcgcggcccagctcgttccagtccagaatgacagggtccagaaactggcgagccacgagggacatgtgtaggtatcggcacaactatccggatctggtggaacgagactgcaatggggacacgccaaacctgagtttctacagaaaatagatccgcttcctgcccaacggctgtttcattgaggacattcttcagaactggacagacaactatgacctccttgaggacaatcactcctac

SEQ ID NO: 10422 - DNA, 438 bp, Homo sapiens
  III.4050 (AI380017)
tgtttgtggctttcctttcttcttatttattgaagataaactccgtttttcagcagaatgctggtcagccgaggtcacacagtgctctgggtgttgaatggtggtacagctttgcttcctccaatccacaattccattctgttcagaatattgcatggtaagcccatccaatggagaacaacttgtaccaatattgttcacaatgggacttttcccagtatgcttcttgtggattatggcatgctgcaacacatctttaccttcttcttgacttgaagcttcagagctgtcttcttttaagtgttctaatatcttagaagtcttcagagaggattgtaagttattgatactgtgtagggagtctgatgatatggactgaaagaagctgtgtactttctgactttgtagaaaagcttgtgatgaacttgaaaatagctg

SEQ ID NO: 10423 - DNA, 473 bp, Homo sapiens
  III.4051 (AI565180)
  misc_feature (447)..(447): n is a, c, g, or t
  misc_feature (451)..(451): n is a, c, g, or t
taagtagctcaaatgacacaagaccagtattgacacatctcgcataaatatgatttttgacagatgtacttattttctgctgtgtaactttttttccaatctagagaactgcatcttatcccatgctgtttactattaatagcagcacaggcatcaaattttaagattacatttttggggacccctttttcttctgttctagctattactttacttgtgtcacctagaaaaggaccagtccttagtcttacttcaaagactgtgatcttgggaggttcagaggggtcatagcacacattgggctggtcactgcctggattacctactttatactgagtgttattatacaaacaggttccttttggagttcttaggcattcataataactataaaataatatgactgtagcaatcttttgtcctacctcagtgacctgatgtatatanctgngaacagtttcagtctgaggaag

SEQ ID NO: 10424 - DNA, 455 bp, Homo sapiens
  III.4052 (AI366999)
tgacttcacagtttattcagagcaggtgcaggtgacctggtgggcagggtgcccaggaggggcaggggtgggcgggcgctccgaaccttgtggtctgaggcaggaactccattaaatcagctcctgcgacacagaagtgcaggggctcaggcccgtgtggtctctggaggccccacggggcttcgatgagggccacacggcgggacttctgtcctcgctgcctggttttgcgcaaagcacccagctccctgagcgccttctcaatctgcaaaatggggtaacaggcccagcctctagggccaagacaaagcgaggtgagggagacactgggttctcgcagtgcccaacatgggagccctgaggcagcgcccgcaggatctgtgccccgccgccgacgggaccttcgggggcagaagcagccggcagtcctgcacggaacaccgaagaaaaggcgc

SEQ ID NO: 10425 - DNA, 292 bp, Homo sapiens
  III.4053 (AI914425)
  misc_feature (188)..(188): n is a, c, g, or t
tttttgtgttccaaggaattccatttattaggacaataggtacctatgaaggaaccagaactctaaaaagaactgtaattgtttctcaggatgatgctttgtgatgtgaaagcaaagcctgctggaagaggggcatcatagttggtggctgctcacaactggacagaaagaagggggaagctacctanatgttcagagggactgccgaatgggagctggctccttgctgggacagggatggacagggtgtttccccttcctctgtcatccctccaaaagtatcaccaatctt

SEQ ID NO: 10426 - DNA, 390 bp, Homo sapiens
  III.4054 (R81827)
  misc_feature (27)..(27): n is a, c, g, or t
  misc_feature (72)..(72): n is a, c, g, or t
  misc_feature (82)..(82): n is a, c, g, or t
  misc_feature (85)..(85): n is a, c, g, or t
  misc_feature (100)..(100): n is a, c, g, or t
  misc_feature (155)..(155): n is a, c, g, or t
  misc_feature (170)..(170): n is a, c, g, or t
  misc_feature (185)..(185): n is a, c, g, or t
  misc_feature (237)..(237): n is a, c, g, or t
  misc_feature (248)..(248): n is a, c, g, or t
  misc_feature (255)..(255): n is a, c, g, or t
  misc_feature (390)..(390): n is a, c, g, or t
tcagcggctgtttcctagtagctcctnggaaattgaggctggggtcaccagtactgcctgaaggtctacgantgaaagggantanttgcgctgccccaangcgggagggacttttttaaaaaatcttttttgcctatggttcctgatccctacangcggtgctgctcggngcaaactcataaatntttctgggggcttaaaccttacttgtcttatgctaaattcttcccttatagngctcaactagnctaaggncaaaaaaagcccacgcagcatccagtgtcacattagagttcatgggctacgcttataaagggtcataggtatgctccagaggggaaagcctgcatgtgatgcccacctaaagccagagacgttctgggaccctan

SEQ ID NO: 10427 - DNA, 438 bp, Homo sapiens
  III.4055 (R81934)
  misc_feature (133)..(133): n is a, c, g, or t
  misc_feature (387)..(387): n is a, c, g, or t
  misc_feature (397)..(397): n is a, c, g, or t
  misc_feature (411)..(411): n is a, c, g, or t
gcaatacaagcttgccagtttttgccccaacagataatccaatgaaggctgtgaaccaaaattttggctaaagcagtctccatggcagtttgatttttaaaggccaaacctcccacgacttcaaagcagggtntcacatgttaaccaggccccctgcttagagctgcagcacaaaagcctggatacatgcaactctattccactttccaattcaacagtaaacttcagattccaaacaatgttggggccaaacagcattgcaactgcggagagaaaattctaaggagggctagacctcagaacctctgccaagagcatcctctttgggagtggctggggtccgcacacaagaaggcattcctcctgtggggttccactcttagggtncccagacgtntctggctttaggtngggcttcatatgcaggttttccctttg

SEQ ID NO: 10428 - DNA, 417 bp, Homo sapiens
  III.4056 (AI913470)
ctgcatcaaacgggtccttcaggtcgtagaagatgatgtcaccgagcaccaggtacaccttcacgtagtagagggtctcctcgtcaaactccagcggcgagttgcagagcgacagggccttgaggtagaagtgctctgccagctcgccatggcccagtcggtgttgcagggcggccagccggtggtaggccacgcgctcgttcagccggtcccccagagtgatgctgagtgctagggccatgtgggcaaactccaagccctcctggggctcctccagcgtggccagcagtgccaccagcttgttgcacagccgcagctccgccttgcggttgcccgtagtcactgccaggggcagggcccggtcccggtagaaggacacagctttctcccgctcccaggccccgtcgaagaagatgt

SEQ ID NO: 10429 - DNA, 432 bp, Homo sapiens
  III.4057 (AI925012)
ttttaaggaagtatggattttattagagacttcttaagcttagaaggaacaacaataatacatatatatataaatctatagttgggttgttgtaaaatcctttaacataattgacaaaaattccatatgattaaataccgaaaataaagtactgtgttaaaaaattatagatatttgcacactcatgtttacagcagcattattcacaatagccaagagatggaggcaacccaaacgtccaccaacagatgaatggataaaaaaatgtggtaaatacatgcagtggaatattattcagccttaaaatggcaggaaatcctatcacattctacaatatggatgaaccttgaggacattatgttaagtgaaatatgtcagctacaaaaggacaaatcctgtatgattccatttatatgaggtatctaaagtagt

SEQ ID NO: 10430 - DNA, 294 bp, Homo sapiens
  III.4058 (AI657085)
tagattctggaatctttaatagcaaattccctagcttataagctcatttgaaatccccaggagtcatgggtgtttagtggatgcccaataggggaggacagaaggggcagctggaagaattgggaacatgtttgctgaaagtgaaatgaagagaaccaatgggaagagtctttcttgccccctcttttgttgggatcctgtatggccactttgacttcgactaggagctgggcagagggtcactgatctctccttccttgatcattgctctgtgactggtactatagtgtttga

SEQ ID NO: 10431 - DNA, 455 bp, Homo sapiens
  III.4059 (AI652176)
tggggcaatcgccgctgttggtttcatctcccagcactgcccattggccgcagcacctcctgcccccacggtgcactcccttctgcggtcatttccttcccagggacattttgctgaaacagcttgtaaaggatggcgcctggctggtgcctctgcctgctatggggtgcgggaggcaatgtgggaagctccgtactctctgatcgatgtatcggtaaaatgaaaactgctctaaaaagtagtcttttaatcaaggtcacagggctgcagcgggctgcgttcaacccagtggcccccacacactccttcaaggaccagcatcccatgcccagcttctgccacttcctctctgggcctgtgcccagcagcaggacaacccttgccacaggcagagcagccccgcactctagtccattgaaaagcctggtgagatgccaggccaggccatgagcgcg

SEQ ID NO: 10432 - DNA, 572 bp, Homo sapiens
  III.4060 (AI677858)
  misc_feature (554)..(554): n is a, c, g, or t
ctttctgtctttctttctttctttcttttctttctttctgtctttcacaggatcttgctttgttgcccaggctggatgcagtggtatgatcttctatttcttccagggcttcacctctaaaatttgtttaggtgtttcttttgtacatccatgggctcgtgcattcgctatcaggcactttttaccatgttgtggtttcccatcgacttgtctgtcttccccaccaaattataaactccatgaggacaggacaaagtctgttcacagctgcatccctggtgcctagctctgggcctggcacacaggaggtacagaaaaagagtgaatcccgttaaattagagcagcagtggaaatctgtgatcttcctgggaagattatgccacagaagacccctcaaagtatcaaacagagggtcttttgctcccctattttccagaattgctttcatcgagacatgttctcagtagtaacagtggtgatagcagacatagtcattgcatttctagctgtgagatcaggagggccctctgacccccagaatggtctttatcanacaattcagcatgttgag

SEQ ID NO: 10433 - DNA, 428 bp, Homo sapiens
  III.4061 (AI565147)
ttttttttttttttttttttttttttttttttttttttttttttttttaaataaaactttttaaaggggccaaaaaattttggaaaaaattttgggcaaagtttttcccttaaaaaagccctgttttaaaaaactaaaacttaaaacttcccccccccaaaaaaaaaaaccaagggggcccaaaaaaatttttttttttttttgaaaggtttaacaagccttggttataataacccagtttttaactacaaaattaaaggggccattgaaaaaaaaaggttttgaaaccgtttttcccccctttttaaaaagggggggggcgggtttaaggaaaaaaattaattaacccttttgactttttggggaaaacttgggaaccttcccacctcaaaaaccctttttgcccacttttttaaaaacacccaccg

SEQ ID NO: 10434 - DNA, 497 bp, Homo sapiens
  III.4062 (AI392907)
tttaattttcatgtattttatttcactcaaataactaaaacatgatcatttcaacatgtaatcagtataaaaactattattgtgatattttacaatttttggggtaccatcttaaaacccagggggcactttaccttaattcagaccagccacacttgaagtgctgcagggttacacatggcttgtggctaccatgttggacagcacaggttctctggtcagatgggatatgaaaaatataactggtggccagtggtccttcacttgccagctactcacctgctgtgtgacgctgggatgggcgcttgccctctctgatgcatcttggtgatgggaacacgcttgatgaatgacagcccattgtcagggtctcatcctccaaagctgtgtgtatcacttactttttgcagactcggaaaaagccggctgttctctaccgcttcttgctagaaacaatggcctatgttaaaaataacttgtcaagaatcagaatcgct

SEQ ID NO: 10435 - DNA, 338 bp, Homo sapiens
  III.4063 (AI695299)
tcttgtaggcaagtggaaatctgttttatttaccacccccttaaactaacatttttcttttaaaatgtattaatttcataaaacagaaggataaaccatctcacctcataatatgtcctacttgaaacaatacatagacttcaagtgctggttctgattgtggtcagaattttaagttaatcttatgaggatagtggggtttttctggtaagttatgatgttaatatgtttttgcttctgaaataatttaaaataatatttaatattttttggtctggaaatttcttcttctatatctgccacccacaacccagtctacatttgaatttactagtttg

SEQ ID NO: 10436 - DNA, 503 bp, Homo sapiens
  III.4064 (AI808639)
tttgaagaaaagaaaatagaacaaaaaatttaatatttcgcaagttgaacaaaaccctttccaagatttacattaggagaaatcattattctgtacaagatttttctggccctaaatattacttaacacattgtttggatccaataacaataatacatgaatcccttaatattaaatttataacttagaaacacattcatcagcctcaaagacaagaaacagaggtgaaagtcttccaaaatagtcaaaatgtgacagtatacacacattaaagtatatacacttcactcatagaacgcctttaccatgagactacacactgtaagcaattcaagccgggtgatctggctgtaaacccacatcagaccagaagctaaaatcctagaaagaatcaatagtagataaccttatattaaagggagtatattagttttctatctgctgctataacaaattactgtgatttagtggcttacgaccaacacaaatttatcatcataaag

SEQ ID NO: 10437 - DNA, 622 bp, Homo sapiens
  III.4065 (AI703176)
  misc_feature (14)..(14): n is a, c, g, or t
  misc_feature (15)..(15): n is a, c, g, or t
  misc_feature (28)..(28): n is a, c, g, or t
  misc_feature (29)..(29): n is a, c, g, or t
  misc_feature (59)..(59): n is a, c, g, or t
  misc_feature (138)..(138): n is a, c, g, or t
  misc_feature (139)..(139): n is a, c, g, or t
  misc_feature (155)..(155): n is a, c, g, or t
  misc_feature (175)..(175): n is a, c, g, or t
  misc_feature (185)..(185): n is a, c, g, or t
  misc_feature (203)..(203): n is a, c, g, or t
  misc_feature (204)..(204): n is a, c, g, or t
  misc_feature (219)..(219): n is a, c, g, or t
  misc_feature (220)..(220): n is a, c, g, or t
  misc_feature (266)..(266): n is a, c, g, or t
  misc_feature (267)..(267): n is a, c, g, or t
  misc_feature (268)..(268): n is a, c, g, or t
  misc_feature (299)..(299): n is a, c, g, or t
  misc_feature (301)..(301): n is a, c, g, or t
  misc_feature (302)..(302): n is a, c, g, or t
  misc_feature (313)..(313): n is a, c, g, or t
  misc_feature (314)..(314): n is a, c, g, or t
  misc_feature (337)..(337): n is a, c, g, or t
  misc_feature (364)..(364): n is a, c, g, or t
taaatttatttcanntaattattttatnntatttttgatatatgattatataattgggnaattgtttacctttaacttttacctttgagattgtgtccttttgcctggtgatactaagtagaccatctcatttttttnntagttgacctcgtatnggtaccaatctcttttgaancctcatttantttatcacctgatagttnntaggctctttttttnnttcgaggtttcattttaagggttttcttataagataaagaatcaannngtcaagaacacccttcagaactcacagggcngnngcgccacgagnncccggccgagtgcatgctggagncgccgacgtctgccgaggatacacagntgctgaggcagaacgcaggttcgtcacagtgggcctccgtgggcggcgccgcacgctcgtcacagtgggcctccgccggctacgccgctgcttcagtggcttgcaggcactttcctcttggaagtggcgactgctgcggggctgagcggtgctcgcacgcgtctcgggagccaggttggcggcgcgatgaggcgcagcaaggccgatgtggagcggtacgtcgcctcggtgctgggtctcaccccgtcgcctcgacag

SEQ ID NO: 10438 - DNA, 435 bp, Homo sapiens
  III.4066 (AI805284)
tttggttttacaggaaatatatttatttatattaagagtttaacaataaaacccacgaaggggaaaaggagggaagattcattgcattccctgtactggataacaggtatttttacacacatcttttagttaaacctgacaaacctttctttagttaaatcccagaaaggaggtagtatatgcccattttatagatggaaattgaatctcagaaggactaagtgatttggccaagatcacatagctgttaactggtagaagtgaatcagcttcacttcttttgactccaaatttcatactaaacttcaaacttacagtcactttggaggctattgaaattggaccacccactctcatctagtctagatctaaatccaaagcttgtgggtggcataggctttcacagccctcaggttttcttgtttggttggttgg

SEQ ID NO: 10439 - DNA, 236 bp, Homo sapiens
  III.4067 (AI371533)
gcattacttgaaccataaaaactagtttaatagcttattttaaagtaacaatgcagtacatgataatcactatataaaagaattacatgtttataatgtaatgattttgttctgatcattttcttataatgactgaatgctaaaggcacagtcactgaaaaaacttacctaatatactccccttgacttagtatttagcactgaatacaaaagttccaatagcttccatataatta

SEQ ID NO: 10440 - DNA, 462 bp, Homo sapiens
  III.4068 (AI356544)
tgcctttataatcaatttattttagagtcaggggagcacacctgcaggtttgttacatggatatcttgtgtgatgctgggatttggacttcaaatgttcctgtcacccaagcagtgagcatagtacctgctcggtagtttttcaaccctcgtcctcatccctcactcctcccttctgaaaacgccactgtttattattcccttctttgtgtcatatgtacccaatatttagctgccacttacaagtgagaacatgtaatatttggttttctgtttctgtgtgaattcgattaggataataaccaccaggtccatccatgttgctgcaaggaacatgatctcattgtttttatgactgtgtggtattccacagtgtttatgtaccacattttctttattcaatccaccactgatgggcatctaggttgattccatgttttcgctactgtgagtagcatagtga

SEQ ID NO: 10441 - DNA, 411 bp, Homo sapiens
  III.4069 (AI458978)
acaaaacaaactagtgaagcacctttttacactggatctctgccgtgtcaaggtgtatagctatcctttgctaccttgcagatatataaaataaaaggatatcctggggcctcaaaatgtagaacacctttagaccatttataactgttcctagaactgttgagaatcatgttctttagtaaatgatctgtggtttacacttaagatggctagaagcttagttacagggtacatagaaatacatagatcaagtaaaactccaactactgtagctggaatttgtaaactaagtttggaaagacctctttttattccctatggagttattctttaatttacagtttattctgtaagttgggaagtaaaatagagaaaataataaatctagatgttctcagtgtcttattcagg

SEQ ID NO: 10442 - DNA, 389 bp, Homo sapiens
  III.4070 (AA027950)
  misc_feature (372)..(372): n is a, c, g, or t
aaggactttttcccctttaatatgaaagtataactacagcagttcaatgtacaaatacaaaaaaagttctcatactaaaaaaaaaaaagtaccataatactgtacatacaaaaactgttcaacaagaatgatttaaatatgtctgttcttgtccagatctggaagacacaaatgtaaagttctgcaactgtattattgctaagaacatgtgcctgggaacactgtgtttccctttctctccctcagcccagccccgcctccagagtcccctgagcttggatcatgagccaacagcatccctgaagataaccagagccaaatgtttactcaatggaagtcattattcagtgagctgctgcttaccataaactnatgaaaagcacaggttt

SEQ ID NO: 10443 - DNA, 368 bp, Homo sapiens
  III.4071 (AA027964)
  misc_feature (314)..(314): n is a, c, g, or t
  misc_feature (326)..(326): n is a, c, g, or t
  misc_feature (329)..(329): n is a, c, g, or t
  misc_feature (360)..(360): n is a, c, g, or t
agatgcttcatttagggtttgggaccattcgagactcactaaacagtaaaaggagggaacttgaggaggtgggtgcttataattatcctttcacttggaatacaccatctgctccccctggctataacattgctgtcaaaccagatcaaatccagtacaccgaactgtccaatgctaagatcgcctacaagcaaaacaaggccaacacagcccaggaacagcagtatggcagccatgaggagaacctcccagctgacctggaggctctgcaagcgggagatcaggatggctcaggaacgcttggatcttggcantttcagggcctncangtcaccaaaacaaccctccatggggtccccnggggagaa

SEQ ID NO: 10444 - DNA, 158 bp, Homo sapiens
  III.4072 (AI682103)
ttttttttttttttggagaaagcagagtctcgctacggtgcccaggacaatttcaaattcctggcctcaagcaatcctcctgtcttggtctaaacatgttgagattaccaggcttgagccaccatgcccagcctgaaaaacttttaagacaagacatt

SEQ ID NO: 10445 - DNA, 402 bp, Homo sapiens
  III.4073 (AI671285)
catggaatgccatttttatttgaaagaacaactgaccaactttggttattaagaatttggtatctggcagaaattgacttgaaaatgaacacactgcgtccctcacttcacagaaagtaactgacagtatttgttaccaatgataaaatccaagctttcaagagaaaattagaattttggaaaacttttctctactactgctaatttgacagtttctcactttttcttctgatgagatcagggatgacattaaaaaataggattttcttcaagtttacataatggaatgtgttaacatttagaaaaaaaaacaactccatgtaacaatatttccaaacaacccccgtgtgtgttaccaaatcatgtccatgagcaaaagacccactctgagcacaagacaga

SEQ ID NO: 10446 - DNA, 373 bp, Homo sapiens
  III.4074 (H03858)
  misc_feature (344)..(344): n is a, c, g, or t
  misc_feature (357)..(357): n is a, c, g, or t
caagatttggtaacaattttttttttaagtcagcatttcatataatacataaaattaagacaaattaacttactgatatgtggccaatatcaacccttctcacccaacccaaacatgttctggagatagaaggacttatcctcaattatattccagtaaatttatctccataatctgttttatcccctaatgtatgatatatctcaccaaatttttctaggaattgaataaaagcagtttttgcttaacttgaatttccttccacaaatacaaccttcagctcttccctctctgtttcccttttgcccacattggcaaataggtcttcatgaataggaaccctncactggcaacttnaaaaggggtcccattt

SEQ ID NO: 10447 - DNA, 434 bp, Homo sapiens
  III.4075 (H03859)
  misc_feature (247)..(247): n is a, c, g, or t
  misc_feature (265)..(265): n is a, c, g, or t
  misc_feature (266)..(266): n is a, c, g, or t
  misc_feature (268)..(268): n is a, c, g, or t
  misc_feature (269)..(269): n is a, c, g, or t
  misc_feature (313)..(313): n is a, c, g, or t
  misc_feature (383)..(383): n is a, c, g, or t
  misc_feature (409)..(409): n is a, c, g, or t
  misc_feature (434)..(434): n is a, c, g, or t
tagttaacgtttatttttataaaatactttaaaagaacagataaagtacttgaggttacataataaccagaattgaaaaggaatgaataaaatataaattaattgaacatatgactattttgccacatcacacaagttttaaaaaggcattttaaaaaacaataaaatagtaattggggaaaaaacccttcactctattggtgtctttgtctggaaaactttcccagaatcactaaaattccagggncaacaggtagtacctganntnnttcaagtatactgtaatttgcttccaaatctgttaggctgaagngagaaactaaaattttatccaagttaattcagtgcaaatcaaaggcttcaagttgaaaatctgagggganaaaataacgttcgaactgtaggggantgcttctgggaccgaaaattaaaan

SEQ ID NO: 10448 - DNA, 434 bp, Homo sapiens
  III.4076 (AI394013)
  misc_feature (418)..(418): n is a, c, g, or t
tttttattgaaagcctgattttatccgaccttttcgttttaaatcagaccacagagggcaagaggggagaaggaagcctggaaacgaaagggaggtttcggtgtccgcaggactcggcccagttggctgacttgggtccataaaggccgaagccttgcgggcagtatccgcatcctccttggccggggcagaggggcagtgcgtcctgccagaacctcctggacgcgcatcgggcaaaaccggagcaggaatgagccggtggcgagggcacccggccctcccttggcgaagtgcgttccttcccgcgatccccgaaatcgctccctgctcgggctgttggactgggcaggttctactttaaacaccagctctgttggccccttcagtcgcttgagtctagacagacggcggcggcggnggccctggtcttttct

SEQ ID NO: 10449 - DNA, 533 bp, Homo sapiens
  III.4077 (AI937165)
  misc_feature (475)..(475): n is a, c, g, or t
gagtcttcaaaggcgtgtttaatataaactaaaattttccatctttccctggcacaaacaaggatatttttgtttgaaaacaaatgtcctttgtgctctgggtagagctgaaatcccaagtttcaacagcagaggagaatacagcttcatgtgccaggggctctcaaatccttgtcccccgcacctcttgcttctccagcacgtcggcccctcaccacacagctcccaggcccatacgggtgctgaccctgcccttccctcggctggaccaaacgctgctttccagggagagaggggaggtccttgcctgtggaacttcctatttctccatttctagaagtgccccgcacaggcagtggggccagaaaggcaccaaggcctcaatgacggggggcctgggagggccgagatgggaggttgtgttccctgagttctgagacccacagaagacgaccaggaccagggactgcggttntggaaaatgtagaagggctgtgagtggtgattttcattgatcctggtcccatctgata

SEQ ID NO: 10450 - DNA, 336 bp, Homo sapiens
  III.4078 (AI686823)
tttttttttttttttttttttttttttttttttttttttttttttttttttttttttttttttttttttttttttttttggggggggtcctttaaaaaaggtttttttgggggggggggaaattcccttaaaaaaaaaaaaaaaacttttttccctttttgggaaaaaattttcccggcccggggacccccccccaaaaagttccccccggtttttagggggggcccggaataaaaaaaaaaccgggcccagggggccttttttattttttgaaccttttaatttgggggggagggggaaaaaataaattttaatttcccttgggaaaaataaaaa

SEQ ID NO: 10451 - DNA, 430 bp, Homo sapiens
  III.4079 (AI366675)
ccaacctaaaagactgagtgtattgttattatctgctatgaagtatcctactgaggtaggataaaatgatgttggtacaaagaatgtgatttgtttatagttataagaaaacgttgaattttttttagcaaaacattatgtctgtgacacattcttaataaaactgtagcaaaatgtaattccagcaattagtgtgaattctactaaaaacaaaacaaaacaaaaaaaaccatggtattctggtttttctgaccaagctctccactctaataactgttacctcttcaatttcaaaaataagcctatttttcatcaatctctgctataaaacagctattgccattcagtagagaaagtggcaaccatttcccctgcactattcccatcacataatcagtcactaataacttattactctcctctcataaaa

SEQ ID NO: 10452 - DNA, 237 bp, Homo sapiens
  III.4080 (AI384015)
gattttggaataaatggatttagccatactgctcggcctggtatgttcccatttccctcactgggtcctgcagtttgtcccactgaatgaggagccccagagtgtctcagcatgtccagctgggctgttggggaccttccaggcctgttacctgtatgctgcctggtgacacctggtggatttcatggggactgccatggcgcctacggagtacactctggccctgacagccaactg

SEQ ID NO: 10453 - DNA, 282 bp, Homo sapiens
  III.4081 (AI611610)
  misc_feature (256)..(256): n is a, c, g, or t
gcggccgcctactactactatacggctgcgagaagacgacagaaggggaggaggaagaagaagaaggaagaaaaagaaaagaaggagaagaagaacgaaggagaaggaaggaggaggagaaggagaagaagacgaaggaaggagaaggaagaagaaagtaagaagaaggagaagacggtgacgaaggaagaagaaggagaaggaagaaggagaagaactaagaagaagaaaggaggaggagaagaaagaaccaaanaaaaaaaaaaaaagtcgtatcgatgt

SEQ ID NO: 10454 - DNA, 463 bp, Homo sapiens; identical to SEQ ID NO: 1265
  III.4082 (N50785)
  misc_feature (463)..(463): n is a, c, g, or t

SEQ ID NO: 10455 - DNA, 143 bp, Homo sapiens; identical to SEQ ID NO: 1258
  III.4083 (N55143)
  misc_feature (5)..(5): n is a, c, g, or t
  misc_feature (21)..(21): n is a, c, g, or t

SEQ ID NO: 10456 - DNA, 441 bp, Homo sapiens
  III.4084 (AI356958)
ttttttttaatttataagaaacaaaatttatttttttacagttacagaggctgagaagtccaagatcaagggaccacatccagtgagagccttcttgctggtgggactgatatggtttgactgttttgtcccctatacatctcgtttcatgtgacctctgatgttggaggtgggcctagtaggaggtgtttgggtcataggggtgcatccctcataaatggcttggtgtgtcctcacagtaatgagtgaatttcaatctgtgagttcacgtgagatcctgttgttcaaaagagcctggcagctcctccctctctctcttgctccttcccttgccatgccacacgctggctcccccttcagcttctgccacgattgtaagcttcttgaggcctcacaggagcagcttgtggtgccatgcttcatgtacatcctgcagaacca

SEQ ID NO: 10457 - DNA, 184 bp, Homo sapiens
  III.4085 (AI590914)
taattggttgtctaggcctatcaaatcaatatcacaaccgatttataagttgtatttttcaatttggaaaacactgctgtaaagatctcaaaatattattctctgatccaaatgggaagaaattcaagaaatggggctttctcctagagacaataaattgtctacaaacaaacaaacaaaccct

SEQ ID NO: 10458 - DNA, 497 bp, Homo sapiens
  III.4086 (AI674125)
ttatcgtggccaggctctttaatgtgttttactactgttatcatcaccatctccattaaacacaacatcaccaatctcattgcacagataagggaaataaagcctaaagaaattaaccaagtgatccaaagtcaccaagagtaaacgtgtggagcaggatgccatctggtcttcctggaggtcagtctgcgaggccacctagatggtccttcaaaccgcaggacagcagctcacgctgctgtgtgggcaagaagcggcctgcatctcatcagagtttggggatccaggacccagatctgctgctccgcagttgtgtgaccttgggaaggtcaggtcccaccctgggtgtgctcttctttcctgaagattcaatccggcctgtgtgctaggagtggagggcctgctggagtctgaggaagatggcagctgggtcggtagcagggtgagcagggtctgagtggggccaggcttcccacactggacaatgatgtccactg

SEQ ID NO: 10459 - DNA, 316 bp, Homo sapiens
  III.4087 (H26085)
  misc_feature (243)..(243): n is a, c, g, or t
  misc_feature (255)..(255): n is a, c, g, or t
  misc_feature (263)..(263): n is a, c, g, or t
ccttaaaactattatttttttccttcttcgtaaaattttggataatctgttctcttaaaaaagttaatgacacaattaagatactgacatcaaattgttgccttttaccaaaatgcaaattttatgaagtgcctacctttatatgtataaagcatttaataaataattctaatgtgccatattttgctgtgagtgaccttaacatttatatttttatatgaattgtttcatgtattataaaanttgtatattgancattgganatagatgattagatttttgtgtcatttacatttaaatcttatgctagtccatt

SEQ ID NO: 10460 - DNA, 446 bp, Homo sapiens
  III.4088 (H28090)
  misc_feature (219)..(219): n is a, c, g, or t
  misc_feature (295)..(295): n is a, c, g, or t
  misc_feature (379)..(379): n is a, c, g, or t
  misc_feature (391)..(391): n is a, c, g, or t
  misc_feature (411)..(411): n is a, c, g, or t
  misc_feature (416)..(416): n is a, c, g, or t
  misc_feature (422)..(422): n is a, c, g, or t
  misc_feature (427)..(427): n is a, c, g, or t
  misc_feature (432)..(432): n is a, c, g, or t
  misc_feature (441)..(441): n is a, c, g, or t
tattgcttattgtaaacactttggcccatagcaaatgttagtttttaaataaccgtaattcaaaactttcacatcctatactatttttccccaagaagcatcatctatgaaaacaatcagtgaactccaacagtctatactggtaatgtgcacattgatgctattatgacacttaatacaaatagtaaaaatactcatctattgtagggcttatgggtntgtaaaatgccttaagggaggccataaacaactcaaagaagagatggtgtggactgaactggcttctatttggggnaaatttgcagaatataggaggtacgcaataaatgtttattgatggtgaagatgagaaaaccctatttctgctgatctttccttnccgttttcctanaggattaagggatatttgantccgncatccncggantcatncagaacccnggact

SEQ ID NO: 10461 - DNA, 201 bp, Homo sapiens
  III.4089 (AI890451)
agcggccgccctttttttttttttttttttttttttttttttttttgagacaagggctcactctgtcgcctaggctggagtgcagtggtgcaatcttggctcaatgaaacctccacctcccagattcaagtgattctcccacctcaacctcctgagtagctgggattaaaggggtgtgccactatacctggcttatttttg

SEQ ID NO: 10462 - DNA, 467 bp, Homo sapiens
  III.4090 (AI523961)
  misc_feature (466)..(466): n is a, c, g, or t
taaaggaacaatgacaaaaacactccagatactcacatccttactggtgaaccactcaatactttccccgaaaggaagagcatggcagaaaggcccagctccccacgccgactcacccgatgccaaaggtcctgaccagcccaacgaggcaggaaaagaaaggaacggcctcaagcctggagaaaaaggtgctcacatggctctatctgcaaatgccaactgtttacaactgtcacccacggctccacagaagctacggttcagaggggccataggacacgagattagtacacaaccatgcatctgcatctccattcactaatagtaaacaactggaaaatcacacgtttaaaaataccatttataatgacataaaaaacataaactacgtaacaattcatttacaaaagacacaaaaccactacactgaaaatcacaaaatgctgctgagaaaaattaaagacanc

SEQ ID NO: 10463 - DNA, 234 bp, Homo sapiens
  III.4091 (AI434609)
aattcatgttaaaatcattgattttaacacaaataactttattgaatcacatcatcttaaatttaacagtgttaggaataaatgatatattgtatttatgaacactcagaaagttttaatgcctactttcagttctaagagatcttttttagacttctagaaattgatcattataaatcatattctaacttaagaacatgttatcttagcatttcttaaattacagacccaact

SEQ ID NO: 10464 - DNA, 387 bp, Homo sapiens
  III.4092 (AI537368)
gtttgagacagagtttcactcctgttgcccaggctggagtgcaatggcacgatctcggctcacggcagcctccacctcccggattcaagcgattctcctgcctcagcctcctgagtagctgggattacaggtgcctgccaccatgcctggctaatttttgtatttttagtagagacggggtttcaccatgttggccgggctggtctcaaactcccgacctcaggtgatccgcccatctcggcctcccaaagtgttgggattgcaggcgtgagccactgtgcccagcccagactcagcttctttgcaaactctaggagggctcgcctctttaagcccagctcagctgtgggctagaatgatcgtttctaatgttcattgcactttatg

SEQ ID NO: 10465 - DNA, 348 bp, Homo sapiens
  III.4093 (AI922002)
gtatttttagtagaggctgggtttcaccgtgttagccaggatggtctcgatcttctgacctcatgatctgcccacctcggcctcccaaagtgctgggattacaggcgtgagccaccacacccagccggtctcttggtttacaaatatagacaaatacataggaacactgactggtatttccatgtcaagaaacatggtcatatgtacagacaagacatggataaccaacaagttttaaagaaatgtatacatctctagttaaagattctaaccagaaatgctacgagagagctggcagatgacaaccaccaatacatagatttctacactcctgaaaaagacaacaac

SEQ ID NO: 10466 - DNA, 1028 bp, Homo sapiens
  III.4094 (AL360183)
aggcaacatttcatgtgctgtcacatcaactgtagaaaaattaacaggtcagctaagggatataatgtaactttatttgtgatatgagagaaatcttgataaagacttgagagaaaactgggaggaaccttgtttagaagttataaggaggggtaagttatgtgtgtcttggaaggagaatcataaatcttaaaacatgagcctaatagagaacataaaattctaaaagataaagataataataatgataagccgcagggtggcttatgataatgtgacttctccttaccccagtagcgtcggacatctgtcagctctgaaatgataaaaatgcacaatattgaatacaaacaaaggagtcagcactgaaattcattttctctccagattagggaaagagtaggtatgccctatggtagggcagtaaattgctgaatgatgagatgaaacagccacctagccatttcccattaaatataatcccatcagcagcagacaatatctatcctcccctatcccctctatccatatttggaaactgcaccctcttccctatttagcaccctaacaccacttgaattccataaccctgttgttgatctagctctcctcacctctaaacacttctagcattcctttcagatcaggagctcgaaacactctcctttgattttttggaaaagtttctggcttcttcaaggtcacgttctccgtcctaagaattaaaaaaaaaaaaaaaacttccaaacctttgaccttgtgtccgtggaacacccctgacttcctatcatttcaacccattgaggcacttgaactctcttcttggggatcctgagaagggagagtgcaaactcttgaccctggaggcaaacaaaatgttctcatgtttgccttcccacttactttctgcgagaacgtgggaagatcttaacctctcagaagcacagtttcttccttctaaaatgaaataattaacctctccctgtctacattcttaaactcataggacataaaaaaaaaaaaaaaaa

SEQ ID NO: 10467 - DNA, 637 bp, Homo sapiens
  III.4095 (AA777892)
  misc_feature (374)..(374): n is a, c, g, or t
  misc_feature (375)..(375): n is a, c, g, or t
  misc_feature (391)..(391): n is a, c, g, or t
cagcttgcatcataagttttattcccgatgcgggacagatctttccatccctcaaatgtattacatgtcgccacggaagggcttaggatgctgctcccatctccaggaaagatgagaaaaaggtacagactgggagccagtccaggaccattctgcagttcctggctctcttaccctcccttctcagcagaggaattatctctcatccattcagttaaaaagaaaaaaaaaaaaatcattaacaaaacaaaacacaccttaagtattgggcaggggtgttcttgtcctcagtaggacgtcaagttctgggtcaccaatggtgattttttttgtttttgttttttgtcatttttgtttgttattttttttttttnnatttgttagttatggntagcagttgtgtgtccacctcatctgcaggcagctgcacatagcggacgactgagcccctgatgaagcagttcttgactgataacatgtgagggtatttctcagggtctgtgacactgatgtcggttagtttgatattgaggtactggtccacagagtggagggttccacagatgctcaggtcattcttgagttccacgactacataccttgccacaagagacttgaaaaaggagtagaagagcat

SEQ ID NO: 10468 - DNA, 264 bp, Homo sapiens
  III.4096 (AI365915)
ttttttttttttttttttttttttttttttttttttttttttagaaaaaggaaagcgggtttttattttatcatcaacagcccttctttaaacatgaacatgcctacgtaatattttacccccccctcacagcttttaacggtgggtaataaagggtaaaccccccacatacctccttacaaaaaaaggcaaaaatgcaaacttaaaactttaaacaaaagttttactaatttaaaaaaaggtggggggggggcccctttggcc

SEQ ID NO: 10469 - DNA, 2682 bp, Homo sapiens
  III.4097 (NM_001609)
attcctgcgccgaggatggagggcctggcagtgcggttgctgcgcggcagcaggctgctaagaagaaatttcctgacttgtttgtcttcttggaagattcctcctcatgtctcaaaatcttcccagtcagaagctctactcaatataacaaataatggaatacactttgctcccctgcaaacatttacagatgaggaaatgatgataaagagttcagttaaaaaatttgctcaggaacaaattgcacctttggtttcaaccatggatgaaaattcgaaaatggagaaatcagtaatacaaggattatttcaacaagggttgatgggtattgaagttgacccagaatatggaggcacaggagcttcttttttatccactgtgctcgtgatagaggaattagccaaagttgatgcatctgtggctgtcttttgtgagatccagaacacattaattaacacactgattagaaaacatggaacagaagaacaaaaggccacctatttgcctcagctcactacagaaaaagtaggaagtttctgcctttcagaggctggagcaggtagtgactcatttgctttgaagaccagagctgataaagagggagattattatgtcctcaatggatcaaagatgtggatcagcagtgctgagcatgcagggctctttctggtgatggcaaatgtagaccctaccattggatataagggaattacctccttcttagtagatcgtgatactccgggccttcatatagggaaacctgaaaacaaattggggctcagagcttcttccacctgcccgttaacattcgaaaatgtcaaggttccagaagccaatatcttgggacaaattggacatggctataagtatgccatagggagtctcaatgaaggtagaataggaattgctgcacagatgctgggactggcgcaaggatgttttgactacactattccatatattaaagaaaggatacaatttggcaaaagactatttgattttcagggcctccaacaccaagtggctcacgtggccacccagctggaagctgcaagattactaacatacaatgctgctaggcttttagaagctggaaagccattcataaaagaagcgtcaatggccaaatactatgcatcagagattgcaggacaaacaacgagtaaatgtatcgagtggatggggggagtaggctacaccaaagattaccctgtggagaaatacttccgagatgcaaagattggtacgatatatgaaggagcttccaacatccagttgaacaccattgcaaagcatatcgatgcagaatactgacgtctataggagtgggacccctccctggtgtcactgctgtaaaattttaaacggttgtgtcttgttgggagtaagtgccttgcgtgggaataaacttccacagcattcgaatattttaatgaagcccttagtcagggtcctggtgttggcctttttggttttctcttttcaggctgtttaacttaggcacaggagatccacttttaaacttgggaaataagcacctgtatttttttccaaaactgtttttaaagctgtatacgcatacatatatatatttttactctgtcttactctgtcacccaggctagagtgcagtggcgcgatctcagctcactgcagccttgacctcctgggttccggtgattctcatgcctcatcctcccaagtagctggaactacaggtgtgcaccaccatgcctggttcatttttgtgtttttagtagagatggggttttaccatattgcccaggctggtcttctggcttctggatatcgcccaccttggcctcccaaagtgctgggattacagggatgagccaccatgcctggctgggtatttatattatcattctagtttcagagtatacagaagtttcatcccatcatttggaaaaataaaggcatctgaagtacaatattacttatagaaatagtttatattcctattaaatcttaatcttgtggcatcagggaaatatttgttacatagtaggcaatttttatccgtactttatagattcaactctaagttgcaagcgaagtcaaaactgatgaaaatttatttagaaaaatctaaaaattctggttttaaatatgagaatcagtggaaaataagggtataattttgtaggtcatatgattgaagaaaatattattttaacaatgtaaagcaatatgatttgttactataattaacctgtataaaagatacattttatggtggtttcagtaggtcattttaaaaaccaatgtgcattagttttcaagtataaggtttaagtaatttggtttaataatcagaaaatattcaatacagtgttggatatctgtcatgcactattttcagttgacaatttctgtattttaattgaatactgtttcttcagtcatggttattattgcactttatcctgaataatagttcagaaattgggttttggttcagtgattctcaagaaaaagatctcttgcccattaagaagtgtatcaaaatctcataaggaatgagggagagaagggggctgtacagtttgaaaaagcatattcaatattaaaatagttttatatttgggaaggcaaaaatgaatctattgttttgcaatataggttatacaggaaaatgcaataaaatatatatctggttgt

SEQ ID NO: 10470 - DNA, 1456 bp, Homo sapiens
  III.4098 (NM_000667)
atgcacttgagcagggaagaaatccacaaggactcaccagtctcctggtctgcagagaagacagaatcaacatgagcacagcaggaaaagtaatcaaatgcaaagcagctgtgctatgggagttaaagaaacccttttccattgaggaggtggaggttgcacctcctaaggcccatgaagttcgtattaagatggtggctgtaggaatctgtggcacagatgaccacgtggttagtggtaccatggtgaccccacttcctgtgattttaggccatgaggcagccggcatcgtggagagtgttggagaaggggtgactacagtcaaaccaggtgataaagtcatcccactcgctattcctcagtgtggaaaatgcagaatttgtaaaaacccggagagcaactactgcttgaaaaacgatgtaagcaatcctcaggggaccctgcaggatggcaccagcaggttcacctgcaggaggaagcccatccaccacttccttggcatcagcaccttctcacagtacacagtggtggatgaaaatgcagtagccaaaattgatgcagcctcgcctctagagaaagtctgtctcattggctgtggattttcaactggttatgggtctgcagtcaatgttgccaaggtcaccccaggctctacctgtgctgtgtttggcctgggaggggtcggcctatctgctattatgggctgtaaagcagctggggcagccagaatcattgcggtggacatcaacaaggacaaatttgcaaaggccaaagagttgggtgccactgaatgcatcaaccctcaagactacaagaaacccatccaggaggtgctaaaggaaatgactgatggaggtgtggatttttcatttgaagtcatcggtcggcttgacaccatgatggcttccctgttatgttgtcatgaggcatgtggcacaagtgtcatcgtaggggtacctcctgattcccaaaacctctcaatgaaccctatgctgctactgactggacgtacctggaagggagctattcttggtggctttaaaagtaaagaatgtgtcccaaaacttgtggctgattttatggctaagaagttttcattggatgcattaataacccatgttttaccttttgaaaaaataaatgaaggatttgacctgcttcactctgggaaaagtatccgtaccattctgatgttttgagacaatacagatgttttcccttgtggcagtcttcagcctcctctaccctacatgatctggagcaacagctgggaaatatcattaattctgctcatcacagattttatcaataaattacatttgggggctttccaaagaaatggaaattgatgtaaaattatttttcaagcaaatgtttaaaatccaaatgagaactaaataaagtgttgaacatcagctggggaattgaagccaataaaccttccttcttaaccatt

SEQ ID NO: 10471 - DNA, 2534 bp, Homo sapiens
  III.4099 (NM_000668)
atgcactcaagcagagaagaaatccacaaagactcacagtctgctggtgggcagagaagacagaaacgacatgagcacagcaggaaaagtaatgaaatgcaaagcagctgtgctatgggaggtaaagaaacccttttccattgaggatgtggaggttgcacctcctaaggcttatgaagttcgcattaagatggtggctgtaggaatctgtcgcacagatgaccacgtggttagtggcaaactggtgaccccccttcctgtgattttaggccatgaggcagccggcatcgtggagagtgttggagaaggggtgactacagtcaaaccaggtgataaagtcatcccgctctttactcctcagtgtggaaaatgcagagtttgtaaaaacccggagagcaactactgcttgaaaaatgatctaggcaatccccgggggaccctgcaggatggcaccaggaggttcacctgcagggggaagcccattcaccacttccttggcaccagcaccttctcccagtacacggtggtggatgagaatgcagtggccaaaattgatgcagcctcgaaactggagaaagtctgcctcattggctgtggattctcgactggttatgggtctgcagttaacgttgccaaggtcaccccaggctctacctgtgctgtgtttggcctgggaggggtcggcctatctgctgttatgggctgtaaagcagctggagcagccagaatcattgcggtggacatcaacaaggacaaatttgcaaaggccaaagtgttgggtgccactgaatgcatcaaccctcaagactacaagaaacccatccaggaagtgctaaaggaaatgactgatggaggtgtggatttttcgtttgaagtcatcggtcggcttgacaccatgatggcttccctgttatgttgtcatgaggcatgtggcacaagcgtcatcgtaggggtacctcctgcttcccagaacctctcaataaaccctatgctgctactgactggacgcacctggaagggggctgtttatggtggctttaagagtaaagaaggtatcccaaaacttgtggctgattttatggctaagaagttttcactggatgcgttaataacccatgttttaccttttgaaaaaataaatgaaggatttgacctgcttcactctgggaaaagtatccgtaccgtcctgacgttttgaggcaatagagatgccttcccctgtagcagtcttcagcctcctctaccctacgagatctggagcaacagctaggaaatatcattaattcagctcttcagagatgttatcaataaattacacatgggggctttccaaagaaatggaaattgatgggaaattatttttcaggaaaatttaaaattcaagtgagaagtaaataaagtgttgaacatcagctggggaattgaagccaacaaaccttccttcttaaccattctactgtgtcacctttgccattgaggaaaaatattcctgtgacttcttgcatttttggtatcttcataatctttagtcatcgaatcccagtggaggggacccttttacttgccctgaacatacacatgctgggccattgtgattgaagtcttctaactctgtctcagttttcactgtcgacattttcctttttctaataaaaatgtaccaaatccctggggtaaaagctagggtaaggtaaaggatagactcacatttacaagtagtgaaggtccaagagttctaaatacaggaaatttcttaggaactcaaataaaatgccccacattttactacagtaaatggcagtgtttttatgacttttatactatttctttatggtcgatatacaattgattttttaaaataatagcagatttcttgcttcatatgacaaagcctcaattactaattgtaaaaactgaactattcccagaatcatgttcaaaaaatctgtaatttttgctgatcgaaagtgcttcattgactaaacagtattagtttgtggctataaatgattatttagatgatgactgaaaatgtgtataaagtaattaaaagtaatatggtggctttaagtgtagagatgggatggcaaatgctgtgaatgcagaatgtaaaattggtaactaagaaatggcacaaacaccttaagcaatatattttcctagtagatatatatatacacatacatatatacacatatacaaatgtatatttttgcaaaattgttttcaatctagaacttttctattaactaccatgtcttaaaatcaagtctataatcctagcattagtttaatattttgaatatgtaaacacctgtgttaatgctttgttaatgcttttcccactctcatttgttaatgctttcccactctcgggaaggatttgcattttgagctttatctctaaatgtgacatgcaaagattattcctggtaaaggaggtagctgtctccaaaaatgctattgttgcaatatctacattctatttcatattatgaaagaccttagacataaagtaaaatagtttatcattt

SEQ ID NO: 10472 - DNA, 2503 bp, Homo sapiens
  III.4100 (NM_004315)
ggactttgaaatccaacccggtcacctacccgcgcgactgtgtccacggatggcacgaaagccaagcgagtccccctgccgagctactcgcgtccgcctcctcccaagctgagctctgctccgcccacctgagtccttcgccagttaggaggaaacacagccgcttaatgaactgctgcatcgggctgggagagaaagctcgcgggtcccaccgggcctcctacccaagtctcagcgcgcttttcaccgaggcctcaattctgggatttggcagctttgctgtgaaagcccaatggacagaggactgcagaaaatcaacctatcctccttcaggaccaacgtacagaggtgcagttccatggtacaccataaatcttgacttaccaccctacaaaagatggcatgaattgatgcttgacaaggcaccaatgctaaaggttatagtgaattctctgaagaatatgataaatacattcgtgccaagtggaaaagttatgcaggtggtggatgaaaaattgcctggcctacttggcaactttcctggcccttttgaagaggaaatgaagggtattgccgctgttactgatatacctttaggagagattatttcattcaatattttttatgaattatttaccatttgtacttcaatagtagcagaagacaaaaaaggtcatctaatacatgggagaaacatggattttggagtatttcttgggtggaacataaataatgatacctgggtcataactgagcaactaaaacctttaacagtgaatttggatttccaaagaaacaacaaaactgtcttcaaggcttcaagctttgctggctatgtgggcatgttaacaggattcaaaccaggactgttcagtcttacactgaatgaacgtttcagtataaatggtggttatctgggtattctagaatggattctgggaaagaaagatgccatgtggatagggttcctcactagaacagttctggaaaatagcacaagttatgaagaagccaagaatttattgaccaagaccaagatattggccccagcctactttatcctgggaggcaaccagtctggggaaggttgtgtgattacacgagacagaaaggaatcattggatgtatatgaactcgatgctaagcagggtagatggtatgtggtacaaacaaattatgaccgttggaaacatcccttcttccttgatgatcgcagaacgcctgcaaagatgtgtctgaaccgcaccagccaagagaatatctcatttgaaaccatgtatgatgtcctgtcaacaaaacctgtcctcaacaagctgaccgtatacacaaccttgatagatgttaccaaaggtcaattcgaaacttacctgcgggactgccctgacccttgtataggttggtgagcacacgtctggcctacagaatgcggcctctgagacatgaagacaccatctccatgtgaccgaacactgcagctgtctgaccttccaaagactaagactcgcggcaggttctctttgagtcaaaagcttgtcttcgtccatctgttgacaaatgacagacctttttttttcccccatcagttgatttttcttatttacagataacttctttaggggaagtaaaacagtcatctagaattcactgagttttgtttcactttgacatttggggatctggtgggcagtcgaaccatggtgaactccacctccgtggaataaatggagattcagcgtgggtgttgaatccagcacgtctgtgtgagtaacgggacagtaaacactccacattcttcagtttttcacttctacctacatatttgtatgtttttctgtataacagccttttccttctggttctaactgctgttaaaattaatatatcattatctttgctgttattgacagcgatataattttattacatatgattagagggatgagacagacattcacctgtatatttcttttaatgggcacaaaatgggcccttgcctctaaatagcactttttggggttcaagaagtaatcagtatgcaaagcaatcttttatacaataattgaagtgttccctttttcataattactgtacttcccagtaaccctaaggaagttgctaacttaaaaaactgcatcccacgttctgttaatttagtaaataaacaagtcaaagacttgtggaaaataggaagtgaacccatattttaaattctcataagtagcattcatgtaataaacaggtttttagtttgttcttcagattgatagggagttttaaagaaattttagtagttactaaaattatgttactgtatttttcagaaatcaaactgcttatgaaaagtactaatagaacttgttaacctttctaaccttcacgattaactgtgaaatgtacgtcatttgtgcaagaccgtttgtccacttcattttgtataatcacagttgtgttcctgacactcaataaacagtcattggaaagagtgccagtcagcagtcatgca

SEQ ID NO: 10473 - DNA, 3496 bp, Homo sapiens
  III.4101 (NM_001166)
gaattctatggagtgtaattttgtgtatgaattatatttttaaaacattgaagagttttcagaaagaaggctagtagagttgattactgatactttatgctaagcagtacttttttggtagtacaatattttgttaggcgtttctgataacactagaaaggacaagttttatcttgtgataaattgattaatgtttacaacatgactgataattatagctgaatagtccttaaatgatgaacaggttatttagtttttaaatgcagtgtaaaaagtgtgctgtggaaattttatggctaactaagtttatggagaaaataccttcagttgatcaagaataatagtggtatacaaagttaggaagaaagtcaacatgatgctgcaggaaatggaaacaaatacaaatgatatttaacaaagatagagtttacagtttttgaactttaagccaaattcatttgacatcaagcactatagcaggcacaggttcaacaaagcttgtgggtattgacttcccccaaaagttgtcagctgaagtaatttagcccacttaagtaaatactatgatgataagctgtgtgaacttagcttttaaatagtgtgaccatatgaaggttttaattacttttgtttattggaataaaatgagattttttgggttgtcatgttaaagtgcttatagggaaagaagcctgcatataattttttaccttgtggcataatcagtaattggtctgttattcaggcttcatagcttgtaaccaaatataaataaaaggcataatttaggtattctatagttgcttagaattttgttaatataaatctctgtgaaaaatcaaggagttttaatattttcagaagtgcatccacctttcagggctttaagttagtattactcaagattatgaacaaatagcacttaggttacctgaaagagttactacaaccccaaagagttgtgttctaagtagtatcttggaaattcagagagatactcatcctacctgaatataaactgagataaatccagtaaagaaagtgtagtaaattctacataagagtctatcattgatttcttttggtggtaaaaatcttagttcatgtgaagaaatttcatgtgaatgttttagctatcaaacagcactgtcacctactcatgcacaaaactgcctcccaaagacttttcccaggtccctcgtatcaaaacattaagagtataatggaagatagcacgatcttgtcagattggacaaacagcaacaaacaaaaaatgaagtatgacttttcctgtgaactctacagaatgtctacatattcaactttccccgccggggtgcctgtctcagaaaggagtcttgctcgtgctggtttttattatactggtgtgaatgacaaggtcaaatgcttctgttgtggcctgatgctggataactggaaactaggagacagtcctattcaaaagcataaacagctatatcctagctgtagctttattcagaatctggtttcagctagtctgggatccacctctaagaatacgtctccaatgagaaacagttttgcacattcattatctcccaccttggaacatagtagcttgttcagtggttcttactccagcctttctccaaaccctcttaattctagagcagttgaagacatctcttcatcgaggactaacccctacagttatgcaatgagtactgaagaagccagatttcttacctaccatatgtggccattaacttttttgtcaccatcagaattggcaagagctggtttttattatataggacctggagatagggtagcctgctttgcctgtggtgggaagctcagtaactgggaaccaaaggatgatgctatgtcagaacaccggaggcattttcccaactgtccatttttggaaaattctctagaaactctgaggtttagcatttcaaatctgagcatgcagacacatgcagctcgaatgagaacatttatgtactggccatctagtgttccagttcagcctgagcagcttgcaagtgctggtttttattatgtgggtcgcaatgatgatgtcaaatgcttttgttgtgatggtggcttgaggtgttgggaatctggagatgatccatgggtagaacatgccaagtggtttccaaggtgtgagttcttgatacgaatgaaaggccaagagtttgttgatgagattcaaggtagatatcctcatcttcttgaacagctgttgtcaacttcagataccactggagaagaaaatgctgacccaccaattattcattttggacctggagaaagttcttcagaagatgctgtcatgatgaatacacctgtggttaaatctgccttggaaatgggctttaatagagacctggtgaaacaaacagttcaaagtaaaatcctgacaactggagagaactataaaacagttaatgatattgtgtcagcacttctaaatgctgaagatgaaaaaagagaggaggagaaggaaaaacaagctgaagaaatggcatcagatgatttgtcattaattcggaagaacagaatggctctctttcaacaattgacatgtgtgcttcctatcctggataatcttttaaaggccaatgtaattaataaacaggaacatgatattattaaacaaaaaacacagatacctttacaagcgagagaactgattgataccattttggttaaaggaaatgctgcggccaacatcttcaaaaactgtctaaaagaaattgactctacattgtataagaacttatttgtggataagaatatgaagtatattccaacagaagatgtttcaggtctgtcactggaagaacaattgaggaggttgcaagaagaacgaacttgtaaagtgtgtatggacaaagaagtttctgttgtatttattccttgtggtcatctggtagtatgccaggaatgtgccccttctctaagaaaatgccctatttgcaggggtataatcaagggtactgttcgtacatttctctcttaaagaaaaatagtctatattttaacctgcataaaaaggtctttaaaatattgttgaacacttgaagccatctaaagtaaaaagggaattatgagtttttcaattagtaacattcatgttctagtctgctttggtactaataatcttgtttctgaaaagatggtatcatatatttaatcttaatctgtttatttacaagggaagatttatgtttggtgaactatattagtatgtatgtgtacctaagggagtagtgtcactgcttgttatgcatcatttcaggagttactggatttgttgttctttcagaaagctttgaatactaaattatagtgtagaaaagaactggaaaccaggaactctggagttcatcagagttatggtgccgaattgtctttggtgcttttcacttgtgttttaaaataaggatttttctcttatttctccccctagtttgtgagaaacatctcaataaagtgcttt

SEQ ID NO: 10474 - DNA, 2279 bp, Homo sapiens
  III.4102 (NM_001752)
tgcctgctgagggtggagacccacgagccgaggcctcctgcagtgttctgcacagcaaaccgcacgctatggctgacagccgggatcccgccagcgaccagatgcagcactggaaggagcagcgggccgcgcagaaagctgatgtcctgaccactggagctggtaacccagtaggagacaaacttaatgttattacagtagggccccgtgggccccttcttgttcaggatgtggttttcactgatgaaatggctcattttgaccgagagagaattcctgagagagttgtgcatgctaaaggagcaggggcctttggctactttgaggtcacacatgacattaccaaatactccaaggcaaaggtatttgagcatattggaaagaagactcccatcgcagttcggttctccactgttgctggagaatcgggttcagctgacacagttcgggaccctcgtgggtttgcagtgaaattttacacagaagatggtaactgggatctcgttggaaataacacccccattttcttcatcagggatcccatattgtttccatcttttatccacagccaaaagagaaatcctcagacacatctgaaggatccggacatggtctgggacttctggagcctacgtcctgagtctctgcatcaggtttctttcttgttcagtgatcgggggattccagatggacatcgccacatgaatggatatggatcacatactttcaagctggttaatgcaaatggggaggcagtttattgcaaattccattataagactgaccagggcatcaaaaacctttctgttgaagatgcggcgagactttcccaggaagatcctgactatggcatccgggatctttttaacgccattgccacaggaaagtacccctcctggactttttacatccaggtcatgacatttaatcaggcagaaacttttccatttaatccattcgatctcaccaaggtttggcctcacaaggactaccctctcatcccagttggtaaactggtcttaaaccggaatccagttaattactttgctgaggttgaacagatagccttcgacccaagcaacatgccacctggcattgaggccagtcctgacaaaatgcttcagggccgcctttttgcctatcctgacactcaccgccatcgcctgggacccaattatcttcatatacctgtgaactgtccctaccgtgctcgagtggccaactaccagcgtgatggcccgatgtgcatgcaggacaatcagggtggtgctccaaattactaccccaacagctttggtgctccggaacaacagccttctgccctggagcacagcatccaatattctggagaagtgcggagattcaacactgccaatgatgataacgttactcaggtgcgggcattctatgtgaacgtgctgaatgaggaacagaggaaacgtctgtgtgagaacattgccggccacctgaaggatgcacaaattttcatccagaagaaagcggtcaagaacttcactgaggtccaccctgactacgggagccacatccaggctcttctggacaagtacaatgctgagaagcctaagaatgcgattcacacctttgtgcagtccggatctcacttggcggcaagggagaaggcaaatctgtgaggccggggccctgcacctgtgcagcgaagcttagcgttcatccgtgtaacccgctcatcactggatgaagattctcctgtgctagatgtgcaaatgcaagctagtggcttcaaaatagagaatcccactttctatagcagattgtgtaacaattttaatgctatttccccaggggaaaatgaaggttaggatttaacagtcatttaaaaaaaaaatttgttttgacggatgattggattattcatttaaaatgattagaaggcaagtttctagctagaaatatgattttatttgacaaaatttgttgaaattatgtatgtttacatatcacctcatggcctattatattaaaatatggctataaatatataaaaagaaaagataaagatgatctactcagaaatttttatttttctaaggttctcataggaaaagtacatttaatacagcagtgtcatcagaagataacttgagcaccgtcatggcttaatgtttattcctgataataattgatcaaattcatttttttcactggagttacattaatgttaattcagcactgatttcacaacagatcaatttgtaattgcttacatttttacaataaataatctgtacgtaagaaca

SEQ ID NO: 10475 - DNA, 2301 bp, Homo sapiens
  III.4103 (NM_003869)
tgactgctcagtcccgctctcctaccacacccacctttcccggcccaagccagcgcaccccgctgactccctgcccagtccaaactccaaggctgggcaaggcactgatccactgctggacagacccggggcagcctctgggtgaacagcagcgtgtccgccggcagcgaaccgagaccagcgagccgaccatgcggctgcacagacttcgtgcgcggctgagcgcggtggcctgtgggcttctgctgcttcttgtccggggccagggccaggactcagccagtcccatccggaccacacacacggggcaggtgctggggagtcttgtccatgtgaagggcgccaatgccggggtccaaaccttcctgggaattccatttgccaagccacctctaggtccgctgcgatttgcaccccctgagccccctgaatcttggagtggtgtgagggatggaaccacccatccggccatgtgtctacaggacctcaccgcagtggagtcagagtttcttagccagttcaacatgaccttcccttccgactccatgtctgaggactgcctgtacctcagcatctacacgccggcccatagccatgaaggctctaacctgccggtgatggtgtggatccacggtggtgcgcttgtttttggcatggcttccttgtatgatggttccatgctggctgccttggagaacgtggtggtggtcatcatccagtaccgcctgggtgtcctgggcttcttcagcactggagacaagcacgcaaccggcaactggggctacctggaccaagtggctgcactacgctgggtccagcagaatatcgcccactttggaggcaaccctgaccgtgtcaccatttttggcgagtctgcgggtggcacgagtgtgtcttcgcttgttgtgtcccccatatcccaaggactcttccacggagccatcatggagagtggcgtggccctcctgcccggcctcattgccagctcagctgatgtcatctccacggtggtggccaacctgtctgcctgtgaccaagttgactctgaggccctggtgggctgcctgcggggcaagagtaaagaggagattcttgcaattaacaagcctttcaagatgatccccggagtggtggatggggtcttcctgcccaggcacccccaggagctgctggcctctgccgactttcagcctgtccctagcattgttggtgtcaacaacaatgaattcggctggctcatccccaaggtcatgaggatctatgatacccagaaggaaatggacagagaggcctcccaggctgctctgcagaaaatgttaacgctgctgatgttgcctcctacatttggtgacctgctgagggaggagtacattggggacaatggggatccccagaccctccaagcgcagttccaggagatgatggcggactccatgtttgtgatccctgcactccaagtagcacattttcagtgttcccgggcccctgtgtacttctacgagttccagcatcagcccagctggctcaagaacatcaggccaccgcacatgaaggcagaccatggtgatgagcttccttttgttttcagaagtttctttgggggcaactacattaaattcactgaggaagaggagcagctaagcaggaagatgatgaagtactgggccaactttgcgagaaatgggaaccccaatggcgagggtctgccacactggccgctgttcgaccaggaggagcaatacctgcagctgaacctacagcctgcggtgggccgggctctgaaggcccacaggctccagttctggaagaaggcgctgccccaaaagatccaggagctcgaggagcctgaagagagacacacagagctgtagctccctgtgccggggaggagggggtgggttcgctgacaggcgagggtcagcctgctgtgcccacacacacccactaaggagaaagaagttgattccttcattcacttcgccattcattcatacttccgtccagaagttgattccttcattcacttcgccattcattcatacttccgtccatccattcagaaagcatttattaagaatttactcaggcatgatggcccatacttgtaatcccagctattgggaaggatgagatgggaggatggcttgaggccagaggtttgagaccgaccagccagggcaacacagtgagaccccttctcaaaaaaaaaaaaaaaaaaagagagagtgtgtgattagaagctaaataggaaagttttgagcttcaagtcagtgaggagtaaaaaagatttttaaaaagcaa

SEQ ID NO: 10476 - DNA, 2205 bp, Homo sapiens
  III.4104 (NM_001909)
gcgcacgccggccgcgcccacgtgaccggtccgggtgcaaacacgcgggtcagctgatccggcccaactgcggcgtcatcccggctataagcgcacggcctcggcgaccctctccgacccggccgccgccgccatgcagccctccagccttctgccgctcgccctctgcctgctggctgcacccgcctccgcgctcgtcaggatcccgctgcacaagttcacgtccatccgccggaccatgtcggaggttgggggctctgtggaggacctgattgccaaaggccccgtctcaaagtactcccaggcggtgccagccgtgaccgaggggcccattcccgaggtgctcaagaactacatggacgcccagtactacggggagattggcatcgggacgcccccccagtgcttcacagtcgtcttcgacacgggctcctccaacctgtgggtcccctccatccactgcaaactgctggacatcgcttgctggatccaccacaagtacaacagcgacaagtccagcacctacgtgaagaatggtacctcgtttgacatccactatggctcgggcagcctctccgggtacctgagccaggacactgtgtcggtgccctgccagtcagcgtcgtcagcctctgccctgggcggtgtcaaagtggagaggcaggtctttggggaggccaccaagcagccaggcatcaccttcatcgcagccaagttcgatggcatcctgggcatggcctacccccgcatctccgtcaacaacgtgctgcccgtcttcgacaacctgatgcagcagaagctggtggaccagaacatcttctccttctacctgagcagggacccagatgcgcagcctgggggtgagctgatgctgggtggcacagactccaagtattacaagggttctctgtcctacctgaatgtcacccgcaaggcctactggcaggtccacctggaccaggtggaggtggccagcgggctgaccctgtgcaaggagggctgtgaggccattgtggacacaggcacttccctcatggtgggcccggtggatgaggtgcgcgagctgcagaaggccatcggggccgtgccgctgattcagggcgagtacatgatcccctgtgagaaggtgtccaccctgcccgcgatcacactgaagctgggaggcaaaggctacaagctgtccccagaggactacacgctcaaggtgtcgcaggccgggaagaccctctgcctgagcggcttcatgggcatggacatcccgccacccagcgggccactctggatcctgggcgacgtcttcatcggccgctactacactgtgtttgaccgtgacaacaacagggtgggcttcgccgaggctgcccgcctctagttcccaaggcgtccgcgcgccagcacagaaacagaggagagtcccagagcaggaggcccctggcccagcggcccctcccacacacacccacacactcgcccgcccactgtcctgggcgccctggaagccggcggcccaagcccgacttgctgttttgttctgtggttttcccctccctgggttcagaaatgctgcctgcctgtctgtctctccatctgtttggtgggggtagagctgatccagagcacagatctgtttcgtgcattggaagaccccacccaagcttggcagccgagctcgtgtatcctggggctcccttcatctccagggagtcccctccccggccctaccagcgcccgctgggctgagcccctaccccacaccaggccgtcctcccgggccctcccttggaaacctgccctgcctgagggcccctctgcccagcttgggcccagctgggctctgccaccctacctgttcagtgtcccgggcccgttgaggatgaggccgctagaggcctgaggatgagctggaaggagtgagaggggacaaaacccaccttgttggagcctgcagggtggtgctgggactgagccagtcccaggggcatgtattggcctggaggtggggttgggattgggggctggtgccagccttcctctgcagctgacctctgttgtcctccccttgggcggctgagagccccagctgacatggaaatacagttgttggcctccggcctcccctcaaaaaaaaaaaaaaaaaaaaaaaaaaaaaaaaaaaaaaaaaaaaaaaaaaaaaaaaaaaaaaaaaaaaaaaaaaaaaaaaaaaaa

SEQ ID NO: 10477 - DNA, 1851 bp, Homo sapiens
  III.4105 (NM_000770)
cttaataagaagagaaggcttcaatggaaccttttgtggtcctggtgctgtgtctctcttttatgcttctcttttcactctggagacagagctgtaggagaaggaagctccctcctggccccactcctcttcctattattggaaatatgctacagatagatgttaaggacatctgcaaatctttcaccaatttctcaaaagtctatggtcctgtgttcaccgtgtattttggcatgaatcccatagtggtgtttcatggatatgaggcagtgaaggaagccctgattgataatggagaggagttttctggaagaggcaattccccaatatctcaaagaattactaaaggacttggaatcatttccagcaatggaaagagatggaaggagatccggcgtttctccctcacaaacttgcggaattttgggatggggaagaggagcattgaggaccgtgttcaagaggaagctcactgccttgtggaggagttgagaaaaaccaaggcttcaccctgtgatcccactttcatcctgggctgtgctccctgcaatgtgatctgctccgttgttttccagaaacgatttgattataaagatcagaattttctcaccctgatgaaaagattcaatgaaaacttcaggattctgaactccccatggatccaggtctgcaataatttccctctactcattgattgtttcccaggaactcacaacaaagtgcttaaaaatgttgctcttacacgaagttacattagggagaaagtaaaagaacaccaagcatcactggatgttaacaatcctcgggactttatggattgcttcctgatcaaaatggagcaggaaaaggacaaccaaaagtcagaattcaatattgaaaacttggttggcactgtagctgatctatttgttgctggaacagagacaacaagcaccactctgagatatggactcctgctcctgctgaagcacccagaggtcacagctaaagtccaggaagagattgatcatgtaattggcagacacaggagcccctgcatgcaggataggagccacatgccttacactgatgctgtagtgcacgagatccagagatacagtgaccttgtccccaccggtgtgccccatgcagtgaccactgatactaagttcagaaactacctcatccccaagggcacaaccataatggcattactgacttccgtgctacatgatgacaaagaatttcctaatccaaatatctttgaccctggccactttctagataagaatggcaactttaagaaaagtgactacttcatgcctttctcagcaggaaaacgaatttgtgcaggagaaggacttgcccgcatggagctatttttatttctaaccacaattttacagaactttaacctgaaatctgttgatgatttaaagaacctcaatactactgcagttaccaaagggattgtttctctgccaccctcataccagatctgcttcatccctgtctgaagaatgctagcccatctggctgctgatctgctatcacctgcaactctttttttatcaaggacattcccactattatgtcttctctgacctctcatcaaatcttcccattcactcaatatcccataagcatccaaactccattaaggagagttgttcaggtcactgcacaaatatatctgcaattattcatactctgtaacacttgtattaattgctgcatatgctaatacttttctaatgctgactttttaatatgttatcactgtaaaacacagaaaagtgattaatgaatgataatttagtccatttcttttgtgaatgtgctaaataaaaagtgttattaattgctggttca

SEQ ID NO: 10478 - DNA, 1890 bp, Homo sapiens
  III.4106 (NM_030878)
cttaataagaagagaaggcttcaatggaaccttttgtggtcctggtgctgtgtctctcttttatgcttctcttttcactctggagacagagctgtaggagaaggaagctccctcctggccccactcctcttcctattattggaaatatgctacagatagatgttaaggacatctgcaaatctttcaccaatttctcaaaagtctatggtcctgtgttcaccgtgtattttggcatgaatcccatagtggtgtttcatggatatgaggcagtgaaggaagccctgattgataatggagaggagttttctggaagaggcaattccccaatatctcaaagaattactaaaggacttggaatcatttccagcaatggaaagagatggaaggagatccggcgtttctccctcacaaacttgcggaattttgggatggggaagaggagcattgaggaccgtgttcaagaggaagctcactgccttgtggaggagttgagaaaaaccaaggcttcaccctgtgatcccactttcatcctgggctgtgctccctgcaatgtgatctgctccgttgttttccagaaacgatttgattataaagatcagaattttctcaccctgatgaaaagattcaatgaaaacttcaggattctgaactccccatggatccaggtctgcaataatttccctctactcattgattgtttcccaggaactcacaacaaagtgcttaaaaatgttgctcttacacgaagttacattagggagaaagtaaaagaacaccaagcatcactggatgttaacaatcctcgggactttatggattgcttcctgatcaaaatggagcaggaaaaggacaaccaaaagtcagaattcaatattgaaaacttggttggcactgtagctgatctatttgttgctggaacagagacaacaagcaccactctgagatatggactcctgctcctgctgaagcacccagaggtcacagctaaagtccaggaagagattgatcatgtaattggcagacacaggagcccctgcatgcaggataggagccacatgccttacactgatgctgtagtgcacgagatccagagatacagtgaccttgtccccaccggtgtgccccatgcagtgaccactgatactaagttcagaaactacctcatccccaagagctttgataacaagataatgctggctgcataaaactagggcacaaccataatggcattactgacttccgtgctacatgatgacaaagaatttcctaatccaaatatctttgaccctggccactttctagataagaatggcaactttaagaaaagtgactacttcatgcctttctcagcaggaaaacgaatttgtgcaggagaaggacttgcccgcatggagctatttttatttctaaccacaattttacagaactttaacctgaaatctgttgatgatttaaagaacctcaatactactgcagttaccaaagggattgtttctctgccaccctcataccagatctgcttcatccctgtctgaagaatgctagcccatctggctgctgatctgctatcacctgcaactctttttttatcaaggacattcccactattatgtcttctctgacctctcatcaaatcttcccattcactcaatatcccataagcatccaaactccattaaggagagttgttcaggtcactgcacaaatatatctgcaattattcatactctgtaacacttgtattaattgctgcatatgctaatacttttctaatgctgactttttaatatgttatcactgtaaaacacagaaaagtgattaatgaatgataatttagtccatttcttttgtgaatgtgctaaataaaaagtgttattaattgctggttca

SEQ ID NO: 10479 - DNA, 5043 bp, Homo sapiens
  III.4107 (NM_004458)
cgggattcggctggctctgccacaccaccgcgcgcccccgctccgcccgcccctccgggcgcgtcttttccgggctcgcgctgagtcccgcctccgccggctgtccgggtgcgcgcgcgccgctgcggctttttctctggcctccgccgcgcgctcctcctcgtcccagcgctagcgggcacgcggttcctttttgcgagctttccgagtgccaggcgccggccggctgcgaagacgcggtgggccgcccctccgattgaaatcacagaagatattcgtgttcttcttaagagaaaaagaggacatttaaaaacgctatggcaaagagaataaaagctaagcccacttcagacaaacctggaagtccatatcgctctgtcacacacttcgactcactagctgtaatagacatccctggagcagatactctggataaattatttgaccatgctgtatccaagtttgggaagaaggacagccttgggaccagggaaatcctaagtgaagaaaatgaaatgcagccaaatggaaaagtttttaagaagttaattcttgggaattataaatggatgaactatcttgaagtgaatcgcagagtgaataactttggtagtggactcactgcactgggactaaaaccaaagaacaccattgccatcttctgtgagaccagggccgaatggatgattgcagcacagacctgctttaagtacaactttcctcttgtgactttatatgccacacttggcaaagaagcagtagttcatgggctaaatgaatctgaggcttcctatctgattaccagtgttgaacttctggaaagtaaacttaagactgcattgttagatatcagttgtgttaaacatatcatttatgtggacaataaggctatcaataaagcagagtaccctgaaggatttgagattcacagcatgcaatcagtagaagagttgggatctaacccagaaaacttgggcattcctccaagtagaccaacgccttcagacatggccattgttatgtatactagtggttctactggccgacctaagggagtgatgatgcatcatagcaatttgatagctggaatgacaggccagtgtgaaagaatacctggactgggaccgaaggacacatatattggctacttgcctttggctcatgtgctagaactgacagcagagatatcttgctttacctatggctgcaggattggatattcttctccgcttacactctctgaccagtccagcaaaattaaaaaaggaagcaaaggagactgtactgtactgaagcccacacttatggctgctgttccggaaatcatggatagaatttataagaatgttatgagcaaagtccaagagatgaattatattcagaaaactctgttcaagatagggtatgattacaaattggaacagatcaaaaagggatatgatgcacctctttgcaatctgttactgtttaaaaaggtcaaggccctgctgggagggaatgtccgcatgatgctgtctggaggggccccgctatctcctcagacacaccgattcatgaatgtctgcttctgctgcccaattggccagggttatggactgacagaatcatgtggtgctgggacagttactgaagtaactgactatactactggcagagttggagcacctcttatttgctgtgaaattaagctaaaagactggcaagaaggcggttatacaattaatgacaagccaaaccccagaggtgaaatcgtaattggtggacagaacatctccatgggatattttaaaaatgaagagaaaacagcagaagattattctgtggatgaaaatggacaaaggtggttttgcactggtgatattggagaattccatcccgatggatgtttacagattatagatcgtaagaaagatctagtgaagttacaagcaggagagtatgtatctcttgggaaagtagaagctgcactgaagaattgtccacttattgacaacatctgtgcttttgccaaaagtgatcagtcctatgtgatcagttttgtggttcctaaccagaaaaggttgacacttttggcacaacagaaaggggtagaaggaacttgggttgatatctgcaataatcctgctatggaagctgaaatactgaaagaaattcgagaagctgcaaatgccatgaaattggagcgatttgaaattccaatcaaggttcgattaagcccagagccatggacccctgaaactggtttggtaactgatgctttcaaactgaaaaggaaggagctgaggaaccattacctcaaagacattgaacgaatgtatgggggcaaataaaatgttgttgtcttattgacagttgtgcaggaggtagcctggtggttttcaacctctagaattttaagcctttgttgaactgttagaatgtaaggtatatcattctaaagatagagtaaaaagaaaacaaaaccaaaagttattaaaattgttgtccggtttactttaacttagttttgcatagttctagtgcagctgaaattgaaaagttatttccctttagctgtgttattatagagcagaaattctgtttttaaaaattagcctaagatatacttgtttttgtaaagaaaaatatttaatgttgaacaaaataaattggagttggagtagaatgtagtttgaggaaatttgcagcttccaatgcctcttgtcttcctatttcagaagtttaaatattaagcatgacagaaaatatgtattaacactactcaaagcaaaagtgctgcagggctttaaaattctcttccaaccatttatcttgaaggaaaaattcaatagtaatataatacacaaaatcaaataataccttagaaggtattaagattataattgttgcataggttagatatagagtcattgtaatgttgtgaataattacagtgcctaaaataagaatagaacaacatatacaacaccaaaaaatatctagtaatatatttaaagggaaattgagctgctttttttgaaactttgagatctaaaaataactgtaattatttgaatgactaagaggaaagtacattttttgaaatgctgaaaattgcctttctgtgtttattcaaactgaaaagctgagaccaagagcaaggaaggtaaaaagttaacaggcaaacattttctcttagaaaaggtgataaaatcataagtatttggaattagaacccttgcacagcactgaacctgggaaagagatttaaactctgaatttatctttgataacagggattgattttaaaatgtacatgtattaaattacatttgtaatttaaggtctgtttgctgttgctgattttattcttgatcagtagtttgcatttcagaaagcctttcattttgctttaagtttagcaaagcggggttataatgaatgacttccccaatatcttgcttgaacttacagtgattaacttggatgagttttgggaagttaaagggaagaaaacactgttatcattttttcctgtttgggaagagcttagaaactggaaatactagatttgggagaagggcagagttacttgataagggacttgatgtttgtgcagtaacttgggagtgtggtttctttttgaatctttaattaaaacctgggattatatatccctgataaatattcacacttgaaccatagttactgtaaaatgcaaaaaatcttaatactgttattctttgcactttttcttaatcattttttatatatatgcatatatatatgtgtgtgtgtgtgttgcttatgttgttttgtacagatgtgggccaccattgcaacaaaatacattctttttgctctaaaatatttatgaagaaaatacttaaatgttatgtatatggtggtaataagggaaaaatcaagtattataaacaagaatgaaggtttttgtaaagatttctgttcagcgttttgcaaggtaaaattttaggcaagttttccctgaagttatgtgtatgtgagtattctcattcttcccaacttgcctttgaagagtgaaataccattattatcaagtagactactgttcagcttttattccttccctggttgtttatcccttaggaatgagtttcttagactttcccaatatgtgattttttttcccatttagaatggtgattttaaatgtgtgagtgcatgtactatcttatctcagatatttgcacccccaatctgcccccaactcccaaaagctagaacactgccaactgatctgttataggtcctttagaaacacataattaacacttaaggttgggtgctgctaattctttgcaaaaatccaaatattgttaagggaccagggagatgccactaccccttgattttccatctaaaaatatacatgtttatgtaaacaaatctttccatatccatagtgacttttcaagtatttaagcctaaagattttgatctcacatttttatacctgtttaaattgctcacagttattacatacacatcagccatcaactaaagttgtactttaaaaatttactacaatatgtacatttctaagtcaaacacttgtgacttttgctttaattccatgaatgttcctgcctccttgatatttgtatttattctttttttctctagagtagaggtataattgtgtgatatttcagaaatacagataaatgattcaaaaagtcacagttaaggagaatcatgtttctttgatcatgaataactgattagtaagtcttgcctatattttcctgatagcatatgacaaatgtttctaaggtaacaagatgagaacagataaagattgtgtggtgttttggatttggagagaaatattttaatttttaaatgcagttacaaattataatgtattcatatttgtactttctgttaaaatgcatgattgcagaattgtttagattttgtgtttattcttgatgaaaagctttgtttgttcttgtttttaagtttgcactcaaatcttaagaaataaatccacccatgttatcaaaaaaaaaaaaaaaaaaa

SEQ ID NO: 10480 - DNA, 5356 bp, Homo sapiens
  III.4108 (NM_022977)
cgggattcggctggctctgccacaccaccgcgcgcccccgctccgcccgcccctccgggcgcgtcttttccgggctcgcgctgagtcccgcctccgccggctgtccgggtgcgcgcgcgccgctgcggctttttctctggcctccgccgcgcgctcctcctcgtcccagcgctagcgggcacgcggttcctttttgcgagctttccgagtgccaggcgccggccggctgcgaagacgcggtgggccgcccctccgattgaaatcacagaagatattcgtgttcttcttaagagaaaaagaggacattttagctttctcagttgaaggcgtactttattgtcggcttccaaagattactaacttttatctgtatcactaagattgaactgccttggctgtactgctattcttactgctgcttctattattgccttcttcagcacaataaggctttcaaaagccaaagaataacaagaaataagcaccattttagaagcctttccactatgaaacttaagctaaatgtgctcaccattattttgctgcctgtccacttgttaataacaatatacagtgcccttatatttattccatggtattttcttaccaatgccaagaagaaaaacgctatggcaaagagaataaaagctaagcccacttcagacaaacctggaagtccatatcgctctgtcacacacttcgactcactagctgtaatagacatccctggagcagatactctggataaattatttgaccatgctgtatccaagtttgggaagaaggacagccttgggaccagggaaatcctaagtgaagaaaatgaaatgcagccaaatggaaaagtttttaagaagttaattcttgggaattataaatggatgaactatcttgaagtgaatcgcagagtgaataactttggtagtggactcactgcactgggactaaaaccaaagaacaccattgccatcttctgtgagaccagggccgaatggatgattgcagcacagacctgctttaagtacaactttcctcttgtgactttatatgccacacttggcaaagaagcagtagttcatgggctaaatgaatctgaggcttcctatctgattaccagtgttgaacttctggaaagtaaacttaagactgcattgttagatatcagttgtgttaaacatatcatttatgtggacaataaggctatcaataaagcagagtaccctgaaggatttgagattcacagcatgcaatcagtagaagagttgggatctaacccagaaaacttgggcattcctccaagtagaccaacgccttcagacatggccattgttatgtatactagtggttctactggccgacctaagggagtgatgatgcatcatagcaatttgatagctggaatgacaggccagtgtgaaagaatacctggactgggaccgaaggacacatatattggctacttgcctttggctcatgtgctagaactgacagcagagatatcttgctttacctatggctgcaggattggatattcttctccgcttacactctctgaccagtccagcaaaattaaaaaaggaagcaaaggagactgtactgtactgaagcccacacttatggctgctgttccggaaatcatggatagaatttataagaatgttatgagcaaagtccaagagatgaattatattcagaaaactctgttcaagatagggtatgattacaaattggaacagatcaaaaagggatatgatgcacctctttgcaatctgttactgtttaaaaaggtcaaggccctgctgggagggaatgtccgcatgatgctgtctggaggggccccgctatctcctcagacacaccgattcatgaatgtctgcttctgctgcccaattggccagggttatggactgacagaatcatgtggtgctgggacagttactgaagtaactgactatactactggcagagttggagcacctcttatttgctgtgaaattaagctaaaagactggcaagaaggcggttatacaattaatgacaagccaaaccccagaggtgaaatcgtaattggtggacagaacatctccatgggatattttaaaaatgaagagaaaacagcagaagattattctgtggatgaaaatggacaaaggtggttttgcactggtgatattggagaattccatcccgatggatgtttacagattatagatcgtaagaaagatctagtgaagttacaagcaggagagtatgtatctcttgggaaagtagaagctgcactgaagaattgtccacttattgacaacatctgtgcttttgccaaaagtgatcagtcctatgtgatcagttttgtggttcctaaccagaaaaggttgacacttttggcacaacagaaaggggtagaaggaacttgggttgatatctgcaataatcctgctatggaagctgaaatactgaaagaaattcgagaagctgcaaatgccatgaaattggagcgatttgaaattccaatcaaggttcgattaagcccagagccatggacccctgaaactggtttggtaactgatgctttcaaactgaaaaggaaggagctgaggaaccattacctcaaagacattgaacgaatgtatgggggcaaataaaatgttgttgtcttattgacagttgtgcaggaggtagcctggtggttttcaacctctagaattttaagcctttgttgaactgttagaatgtaaggtatatcattctaaagatagagtaaaaagaaaacaaaaccaaaagttattaaaattgttgtccggtttactttaacttagttttgcatagttctagtgcagctgaaattgaaaagttatttccctttagctgtgttattatagagcagaaattctgtttttaaaaattagcctaagatatacttgtttttgtaaagaaaaatatttaatgttgaacaaaataaattggagttggagtagaatgtagtttgaggaaatttgcagcttccaatgcctcttgtcttcctatttcagaagtttaaatattaagcatgacagaaaatatgtattaacactactcaaagcaaaagtgctgcagggctttaaaattctcttccaaccatttatcttgaaggaaaaattcaatagtaatataatacacaaaatcaaataataccttagaaggtattaagattataattgttgcataggttagatatagagtcattgtaatgttgtgaataattacagtgcctaaaataagaatagaacaacatatacaacaccaaaaaatatctagtaatatatttaaagggaaattgagctgctttttttgaaactttgagatctaaaaataactgtaattatttgaatgactaagaggaaagtacattttttgaaatgctgaaaattgcctttctgtgtttattcaaactgaaaagctgagaccaagagcaaggaaggtaaaaagttaacaggcaaacattttctcttagaaaaggtgataaaatcataagtatttggaattagaacccttgcacagcactgaacctgggaaagagatttaaactctgaatttatctttgataacagggattgattttaaaatgtacatgtattaaattacatttgtaatttaaggtctgtttgctgttgctgattttattcttgatcagtagtttgcatttcagaaagcctttcattttgctttaagtttagcaaagcggggttataatgaatgacttccccaatatcttgcttgaacttacagtgattaacttggatgagttttgggaagttaaagggaagaaaacactgttatcattttttcctgtttgggaagagcttagaaactggaaatactagatttgggagaagggcagagttacttgataagggacttgatgtttgtgcagtaacttgggagtgtggtttctttttgaatctttaattaaaacctgggattatatatccctgataaatattcacacttgaaccatagttactgtaaaatgcaaaaaatcttaatactgttattctttgcactttttcttaatcattttttatatatatgcatatatatatgtgtgtgtgtgtgttgcttatgttgttttgtacagatgtgggccaccattgcaacaaaatacattctttttgctctaaaatatttatgaagaaaatacttaaatgttatgtatatggtggtaataagggaaaaatcaagtattataaacaagaatgaaggtttttgtaaagatttctgttcagcgttttgcaaggtaaaattttaggcaagttttccctgaagttatgtgtatgtgagtattctcattcttcccaacttgcctttgaagagtgaaataccattattatcaagtagactactgttcagcttttattccttccctggttgtttatcccttaggaatgagtttcttagactttcccaatatgtgattttttttcccatttagaatggtgattttaaatgtgtgagtgcatgtactatcttatctcagatatttgcacccccaatctgcccccaactcccaaaagctagaacactgccaactgatctgttataggtcctttagaaacacataattaacacttaaggttgggtgctgctaattctttgcaaaaatccaaatattgttaagggaccagggagatgccactaccccttgattttccatctaaaaatatacatgtttatgtaaacaaatctttccatatccatagtgacttttcaagtatttaagcctaaagattttgatctcacatttttatacctgtttaaattgctcacagttattacatacacatcagccatcaactaaagttgtactttaaaaatttactacaatatgtacatttctaagtcaaacacttgtgacttttgctttaattccatgaatgttcctgcctccttgatatttgtatttattctttttttctctagagtagaggtataattgtgtgatatttcagaaatacagataaatgattcaaaaagtcacagttaaggagaatcatgtttctttgatcatgaataactgattagtaagtcttgcctatattttcctgatagcatatgacaaatgtttctaaggtaacaagatgagaacagataaagattgtgtggtgttttggatttggagagaaatattttaatttttaaatgcagttacaaattataatgtattcatatttgtactttctgttaaaatgcatgattgcagaattgtttagattttgtgtttattcttgatgaaaagctttgtttgttcttgtttttaagtttgcactcaaatcttaagaaataaatccacccatgttatcaaaaaaaaaaaaaaaaaaaa

SEQ ID NO: 10481 - DNA, 4049 bp, Homo sapiens
  III.4109 (NM_000604)
cctcttgcggccacaggcgcggcgtcctcggcggcgggcggcagctagcgggagccgggacgccggtgcagccgcagcgcgcggaggaacccgggtgtgccgggagctgggcggccacgtccggacgggaccgagacccctcgtagcgcattgcggcgacctcgccttccccggccgcgagcgcgccgctgcttgaaaagccgcggaacccaaggacttttctccggtccgagctcggggcgccccgcaggcgcacggtacccgtgctgcagtcgggcacgccgcggcgccgggggcctccgcagggcgatggagccggtctgcaaggaaagtgaggcgccgccgctgcgttctggaggaggggggcacaaggtctggagaccccgggtggcggacgggagccctccccccgccccgcctccggggcaccagctccggctccattgttcccgcccgggctggaggcgccgagcaccgagcgccgccgggagtcgagcgccggccgcggagctcttgcgaccccgccaggacccgaacagagcccgggggcggcgggccggagccggggacgcgggcacacgcccgctcgcacaagccacggcggactctcccgaggcggaacctccacgccgagcgagggtcagtttgaaaaggaggatcgagctcactgtggagtatccatggagatgtggagccttgtcaccaacctctaactgcagaactgggatgtggagctggaagtgcctcctcttctgggctgtgctggtcacagccacactctgcaccgctaggccgtccccgaccttgcctgaacaagcccagccctggggagcccctgtggaagtggagtccttcctggtccaccccggtgacctgctgcagcttcgctgtcggctgcgggacgatgtgcagagcatcaactggctgcgggacggggtgcagctggcggaaagcaaccgcacccgcatcacaggggaggaggtggaggtgcaggactccgtgcccgcagactccggcctctatgcttgcgtaaccagcagcccctcgggcagtgacaccacctacttctccgtcaatgtttcagatgctctcccctcctcggaggatgatgatgatgatgatgactcctcttcagaggagaaagaaacagataacaccaaaccaaaccgtatgcccgtagctccatattggacatccccagaaaagatggaaaagaaattgcatgcagtgccggctgccaagacagtgaagttcaaatgcccttccagtgggaccccaaaccccacactgcgctggttgaaaaatggcaaagaattcaaacctgaccacagaattggaggctacaaggtccgttatgccacctggagcatcataatggactctgtggtgccctctgacaagggcaactacacctgcattgtggagaatgagtacggcagcatcaaccacacataccagctggatgtcgtggagcggtcccctcaccggcccatcctgcaagcagggttgcccgccaacaaaacagtggccctgggtagcaacgtggagttcatgtgtaaggtgtacagtgacccgcagccgcacatccagtggctaaagcacatcgaggtgaatgggagcaagattggcccagacaacctgccttatgtccagatcttgaagactgctggagttaataccaccgacaaagagatggaggtgcttcacttaagaaatgtctcctttgaggacgcaggggagtatacgtgcttggcgggtaactctatcggactctcccatcactctgcatggttgaccgttctggaagccctggaagagaggccggcagtgatgacctcgcccctgtacctggagatcatcatctattgcacaggggccttcctcatctcctgcatggtggggtcggtcatcgtctacaagatgaagagtggtaccaagaagagtgacttccacagccagatggctgtgcacaagctggccaagagcatccctctgcgcagacaggtaacagtgtctgctgactccagtgcatccatgaactctggggttcttctggttcggccatcacggctctcctccagtgggactcccatgctagcaggggtctctgagtatgagcttcccgaagaccctcgctgggagctgcctcgggacagactggtcttaggcaaacccctgggagagggctgctttgggcaggtggtgttggcagaggctatcgggctggacaaggacaaacccaaccgtgtgaccaaagtggctgtgaagatgttgaagtcggacgcaacagagaaagacttgtcagacctgatctcagaaatggagatgatgaagatgatcgggaagcataagaatatcatcaacctgctgggggcctgcacgcaggatggtcccttgtatgtcatcgtggagtatgcctccaagggcaacctgcgggagtacctgcaggcccggaggcccccagggctggaatactgctacaaccccagccacaacccagaggagcagctctcctccaaggacctggtgtcctgcgcctaccaggtggcccgaggcatggagtatctggcctccaagaagtgcatacaccgagacctggcagccaggaatgtcctggtgacagaggacaatgtgatgaagatagcagactttggcctcgcacgggacattcaccacatcgactactataaaaagacaaccaacggccgactgcctgtgaagtggatggcacccgaggcattatttgaccggatctacacccaccagagtgatgtgtggtctttcggggtgctcctgtgggagatcttcactctgggcggctccccataccccggtgtgcctgtggaggaacttttcaagctgctgaaggagggtcaccgcatggacaagcccagtaactgcaccaacgagctgtacatgatgatgcgggactgctggcatgcagtgccctcacagagacccaccttcaagcagctggtggaagacctggaccgcatcgtggccttgacctccaaccaggagtacctggacctgtccatgcccctggaccagtactcccccagctttcccgacacccggagctctacgtgctcctcaggggaggattccgtcttctctcatgagccgctgcccgaggagccctgcctgccccgacacccagcccagcttgccaatggcggactcaaacgccgctgactgccacccacacgccctccccagactccaccgtcagctgtaaccctcacccacagcccctgctgggcccaccacctgtccgtccctgtcccctttcctgctggcaggagccggctgcctaccaggggccttcctgtgtggcctgccttcaccccactcagctcacctctccctccacctcctctccacctgctggtgagaggtgcaaagaggcagatctttgctgccagccacttcatcccctcccagatgttggaccaacacccctccctgccaccaggcactgcctggagggcagggagtgggagccaatgaacaggcatgcaagtgagagcttcctgagctttctcctgtcggtttggtctgttttgccttcacccataagcccctcgcactctggtggcaggtgccttgtcctcagggctacagcagtagggaggtcagtgcttcgtgcctcgattgaaggtgacctctgccccagataggtggtgccagtggcttattaattccgatactagtttgctttgctgaccaaatgcctggtaccagaggatggtgaggcgaaggccaggttgggggcagtgttgtggccctggggcccagccccaaactgggggctctgtatatagctatgaagaaaacacaaagtgtataaatctgagtatatatttacatgtctttttaaaagggtcgttaccagagatttacccatcgggtaagatgctcctggtggctgggaggcatcagttgctatatattaaaaacaaaaaagaaaaaaaaggaaaatgtttttaaaaaggtcatatattttttgctacttttgctgttttatttttttaaattatgttctaaac

SEQ ID NO: 10482 - DNA, 4043 bp, Homo sapiens
  III.4110 (NM_015850)
cctcttgcggccacaggcgcggcgtcctcggcggcgggcggcagctagcgggagccgggacgccggtgcagccgcagcgcgcggaggaacccgggtgtgccgggagctgggcggccacgtccggacgggaccgagacccctcgtagcgcattgcggcgacctcgccttccccggccgcgagcgcgccgctgcttgaaaagccgcggaacccaaggacttttctccggtccgagctcggggcgccccgcaggcgcacggtacccgtgctgcagtcgggcacgccgcggcgccgggggcctccgcagggcgatggagccggtctgcaaggaaagtgaggcgccgccgctgcgttctggaggaggggggcacaaggtctggagaccccgggtggcggacgggagccctccccccgccccgcctccggggcaccagctccggctccattgttcccgcccgggctggaggcgccgagcaccgagcgccgccgggagtcgagcgccggccgcggagctcttgcgaccccgccaggacccgaacagagcccgggggcggcgggccggagccggggacgcgggcacacgcccgctcgcacaagccacggcggactctcccgaggcggaacctccacgccgagcgagggtcagtttgaaaaggaggatcgagctcactgtggagtatccatggagatgtggagccttgtcaccaacctctaactgcagaactgggatgtggagctggaagtgcctcctcttctgggctgtgctggtcacagccacactctgcaccgctaggccgtccccgaccttgcctgaacaagcccagccctggggagcccctgtggaagtggagtccttcctggtccaccccggtgacctgctgcagcttcgctgtcggctgcgggacgatgtgcagagcatcaactggctgcgggacggggtgcagctggcggaaagcaaccgcacccgcatcacaggggaggaggtggaggtgcaggactccgtgcccgcagactccggcctctatgcttgcgtaaccagcagcccctcgggcagtgacaccacctacttctccgtcaatgtttcagatgctctcccctcctcggaggatgatgatgatgatgatgactcctcttcagaggagaaagaaacagataacaccaaaccaaaccccgtagctccatattggacatccccagaaaagatggaaaagaaattgcatgcagtgccggctgccaagacagtgaagttcaaatgcccttccagtgggaccccaaaccccacactgcgctggttgaaaaatggcaaagaattcaaacctgaccacagaattggaggctacaaggtccgttatgccacctggagcatcataatggactctgtggtgccctctgacaagggcaactacacctgcattgtggagaatgagtacggcagcatcaaccacacataccagctggatgtcgtggagcggtcccctcaccggcccatcctgcaagcagggttgcccgccaacaaaacagtggccctgggtagcaacgtggagttcatgtgtaaggtgtacagtgacccgcagccgcacatccagtggctaaagcacatcgaggtgaatgggagcaagattggcccagacaacctgccttatgtccagatcttgaagactgctggagttaataccaccgacaaagagatggaggtgcttcacttaagaaatgtctcctttgaggacgcaggggagtatacgtgcttggcgggtaactctatcggactctcccatcactctgcatggttgaccgttctggaagccctggaagagaggccggcagtgatgacctcgcccctgtacctggagatcatcatctattgcacaggggccttcctcatctcctgcatggtggggtcggtcatcgtctacaagatgaagagtggtaccaagaagagtgacttccacagccagatggctgtgcacaagctggccaagagcatccctctgcgcagacaggtaacagtgtctgctgactccagtgcatccatgaactctggggttcttctggttcggccatcacggctctcctccagtgggactcccatgctagcaggggtctctgagtatgagcttcccgaagaccctcgctgggagctgcctcgggacagactggtcttaggcaaacccctgggagagggctgctttgggcaggtggtgttggcagaggctatcgggctggacaaggacaaacccaaccgtgtgaccaaagtggctgtgaagatgttgaagtcggacgcaacagagaaagacttgtcagacctgatctcagaaatggagatgatgaagatgatcgggaagcataagaatatcatcaacctgctgggggcctgcacgcaggatggtcccttgtatgtcatcgtggagtatgcctccaagggcaacctgcgggagtacctgcaggcccggaggcccccagggctggaatactgctacaaccccagccacaacccagaggagcagctctcctccaaggacctggtgtcctgcgcctaccaggtggcccgaggcatggagtatctggcctccaagaagtgcatacaccgagacctggcagccaggaatgtcctggtgacagaggacaatgtgatgaagatagcagactttggcctcgcacgggacattcaccacatcgactactataaaaagacaaccaacggccgactgcctgtgaagtggatggcacccgaggcattatttgaccggatctacacccaccagagtgatgtgtggtctttcggggtgctcctgtgggagatcttcactctgggcggctccccataccccggtgtgcctgtggaggaacttttcaagctgctgaaggagggtcaccgcatggacaagcccagtaactgcaccaacgagctgtacatgatgatgcgggactgctggcatgcagtgccctcacagagacccaccttcaagcagctggtggaagacctggaccgcatcgtggccttgacctccaaccaggagtacctggacctgtccatgcccctggaccagtactcccccagctttcccgacacccggagctctacgtgctcctcaggggaggattccgtcttctctcatgagccgctgcccgaggagccctgcctgccccgacacccagcccagcttgccaatggcggactcaaacgccgctgactgccacccacacgccctccccagactccaccgtcagctgtaaccctcacccacagcccctgctgggcccaccacctgtccgtccctgtcccctttcctgctggcaggagccggctgcctaccaggggccttcctgtgtggcctgccttcaccccactcagctcacctctccctccacctcctctccacctgctggtgagaggtgcaaagaggcagatctttgctgccagccacttcatcccctcccagatgttggaccaacacccctccctgccaccaggcactgcctggagggcagggagtgggagccaatgaacaggcatgcaagtgagagcttcctgagctttctcctgtcggtttggtctgttttgccttcacccataagcccctcgcactctggtggcaggtgccttgtcctcagggctacagcagtagggaggtcagtgcttcgtgcctcgattgaaggtgacctctgccccagataggtggtgccagtggcttattaattccgatactagtttgctttgctgaccaaatgcctggtaccagaggatggtgaggcgaaggccaggttgggggcagtgttgtggccctggggcccagccccaaactgggggctctgtatatagctatgaagaaaacacaaagtgtataaatctgagtatatatttacatgtctttttaaaagggtcgttaccagagatttacccatcgggtaagatgctcctggtggctgggaggcatcagttgctatatattaaaaacaaaaaagaaaaaaaaggaaaatgtttttaaaaaggtcatatattttttgctacttttgctgttttatttttttaaattatgttctaaac

SEQ ID NO: 10483 - DNA, 3782 bp, Homo sapiens
  III.4111 (NM_023105)
cctcttgcggccacaggcgcggcgtcctcggcggcgggcggcagctagcgggagccgggacgccggtgcagccgcagcgcgcggaggaacccgggtgtgccgggagctgggcggccacgtccggacgggaccgagacccctcgtagcgcattgcggcgacctcgccttccccggccgcgagcgcgccgctgcttgaaaagccgcggaacccaaggacttttctccggtccgagctcggggcgccccgcaggcgcacggtacccgtgctgcagtcgggcacgccgcggcgccgggggcctccgcagggcgatggagccggtctgcaaggaaagtgaggcgccgccgctgcgttctggaggaggggggcacaaggtctggagaccccgggtggcggacgggagccctccccccgccccgcctccggggcaccagctccggctccattgttcccgcccgggctggaggcgccgagcaccgagcgccgccgggagtcgagcgccggccgcggagctcttgcgaccccgccaggacccgaacagagcccgggggcggcgggccggagccggggacgcgggcacacgcccgctcgcacaagccacggcggactctcccgaggcggaacctccacgccgagcgagggtcagtttgaaaaggaggatcgagctcactgtggagtatccatggagatgtggagccttgtcaccaacctctaactgcagaactgggatgtggagctggaagtgcctcctcttctgggctgtgctggtcacagccacactctgcaccgctaggccgtccccgaccttgcctgaacaagatgctctcccctcctcggaggatgatgatgatgatgatgactcctcttcagaggagaaagaaacagataacaccaaaccaaaccgtatgcccgtagctccatattggacatccccagaaaagatggaaaagaaattgcatgcagtgccggctgccaagacagtgaagttcaaatgcccttccagtgggaccccaaaccccacactgcgctggttgaaaaatggcaaagaattcaaacctgaccacagaattggaggctacaaggtccgttatgccacctggagcatcataatggactctgtggtgccctctgacaagggcaactacacctgcattgtggagaatgagtacggcagcatcaaccacacataccagctggatgtcgtggagcggtcccctcaccggcccatcctgcaagcagggttgcccgccaacaaaacagtggccctgggtagcaacgtggagttcatgtgtaaggtgtacagtgacccgcagccgcacatccagtggctaaagcacatcgaggtgaatgggagcaagattggcccagacaacctgccttatgtccagatcttgaagactgctggagttaataccaccgacaaagagatggaggtgcttcacttaagaaatgtctcctttgaggacgcaggggagtatacgtgcttggcgggtaactctatcggactctcccatcactctgcatggttgaccgttctggaagccctggaagagaggccggcagtgatgacctcgcccctgtacctggagatcatcatctattgcacaggggccttcctcatctcctgcatggtggggtcggtcatcgtctacaagatgaagagtggtaccaagaagagtgacttccacagccagatggctgtgcacaagctggccaagagcatccctctgcgcagacaggtaacagtgtctgctgactccagtgcatccatgaactctggggttcttctggttcggccatcacggctctcctccagtgggactcccatgctagcaggggtctctgagtatgagcttcccgaagaccctcgctgggagctgcctcgggacagactggtcttaggcaaacccctgggagagggctgctttgggcaggtggtgttggcagaggctatcgggctggacaaggacaaacccaaccgtgtgaccaaagtggctgtgaagatgttgaagtcggacgcaacagagaaagacttgtcagacctgatctcagaaatggagatgatgaagatgatcgggaagcataagaatatcatcaacctgctgggggcctgcacgcaggatggtcccttgtatgtcatcgtggagtatgcctccaagggcaacctgcgggagtacctgcaggcccggaggcccccagggctggaatactgctacaaccccagccacaacccagaggagcagctctcctccaaggacctggtgtcctgcgcctaccaggtggcccgaggcatggagtatctggcctccaagaagtgcatacaccgagacctggcagccaggaatgtcctggtgacagaggacaatgtgatgaagatagcagactttggcctcgcacgggacattcaccacatcgactactataaaaagacaaccaacggccgactgcctgtgaagtggatggcacccgaggcattatttgaccggatctacacccaccagagtgatgtgtggtctttcggggtgctcctgtgggagatcttcactctgggcggctccccataccccggtgtgcctgtggaggaacttttcaagctgctgaaggagggtcaccgcatggacaagcccagtaactgcaccaacgagctgtacatgatgatgcgggactgctggcatgcagtgccctcacagagacccaccttcaagcagctggtggaagacctggaccgcatcgtggccttgacctccaaccaggagtacctggacctgtccatgcccctggaccagtactcccccagctttcccgacacccggagctctacgtgctcctcaggggaggattccgtcttctctcatgagccgctgcccgaggagccctgcctgccccgacacccagcccagcttgccaatggcggactcaaacgccgctgactgccacccacacgccctccccagactccaccgtcagctgtaaccctcacccacagcccctgctgggcccaccacctgtccgtccctgtcccctttcctgctggcaggagccggctgcctaccaggggccttcctgtgtggcctgccttcaccccactcagctcacctctccctccacctcctctccacctgctggtgagaggtgcaaagaggcagatctttgctgccagccacttcatcccctcccagatgttggaccaacacccctccctgccaccaggcactgcctggagggcagggagtgggagccaatgaacaggcatgcaagtgagagcttcctgagctttctcctgtcggtttggtctgttttgccttcacccataagcccctcgcactctggtggcaggtgccttgtcctcagggctacagcagtagggaggtcagtgcttcgtgcctcgattgaaggtgacctctgccccagataggtggtgccagtggcttattaattccgatactagtttgctttgctgaccaaatgcctggtaccagaggatggtgaggcgaaggccaggttgggggcagtgttgtggccctggggcccagccccaaactgggggctctgtatatagctatgaagaaaacacaaagtgtataaatctgagtatatatttacatgtctttttaaaagggtcgttaccagagatttacccatcgggtaagatgctcctggtggctgggaggcatcagttgctatatattaaaaacaaaaaagaaaaaaaaggaaaatgtttttaaaaaggtcatatattttttgctacttttgctgttttatttttttaaattatgttctaaac

SEQ ID NO: 10484 - DNA, 3786 bp, Homo sapiens
  III.4112 (NM_023106)
cctcttgcggccacaggcgcggcgtcctcggcggcgggcggcagctagcgggagccgggacgccggtgcagccgcagcgcgcggaggaacccgggtgtgccgggagctgggcggccacgtccggacgggaccgagacccctcgtagcgcattgcggcgacctcgccttccccggccgcgagcgcgccgctgcttgaaaagccgcggaacccaaggacttttctccggtccgagctcggggcgccccgcaggcgcacggtacccgtgctgcagtcgggcacgccgcggcgccgggggcctccgcagggcgatggagccggtctgcaaggaaagtgaggcgccgccgctgcgttctggaggaggggggcacaaggtctggagaccccgggtggcggacgggagccctccccccgccccgcctccggggcaccagctccggctccattgttcccgcccgggctggaggcgccgagcaccgagcgccgccgggagtcgagcgccggccgcggagctcttgcgaccccgccaggacccgaacagagcccgggggcggcgggccggagccggggacgcggagccggggacgcacacgcccgctcgcacaagccacggcggactctcccgaggcggaacctccacgccgagcgagggtcagtttgaaaaggaggatcgagctcactgtggagtatccatggagatgtggagccttgtcaccaacctctaactgcagaactgggatgtggagctggaagtgcctcctcttctgggctgtgctggtcacagccacactctgcaccgctaggccgtccccgaccttgcctgaacaagatgctctcccctcctcggaggatgatgatgatgatgatgactcctcttcagaggagaaagaaacagataacaccaaaccaaaccccgtagctccatattggacatccccagaaaagatggaaaagaaattgcatgcagtgccggctgccaagacagtgaagttcaaatgcccttccagtgggaccccaaaccccacactgcgctggttgaaaaatggcaaagaattcaaacctgaccacagaattggaggctacaaggtccgttatgccacctggagcatcataatggactctgtggtgccctctgacaagggcaactacacctgcattgtggagaatgagtacggcagcatcaaccacacataccagctggatgtcgtggagcggtcccctcaccggcccatcctgcaagcagggttgcccgccaacaaaacagtggccctgggtagcaacgtggagttcatgtgtaaggtgtacagtgacccgcagccgcacatccagtggctaaagcacatcgaggtgaatgggagcaagattggcccagacaacctgccttatgtccagatcttgaagactgctggagttaataccaccgacaaagagatggaggtgcttcacttaagaaatgtctcctttgaggacgcaggggagtatacgtgcttggcgggtaactctatcggactctcccatcactctgcatggttgaccgttctggaagccctggaagagaggccggcagtgatgacctcgcccctgtacctggagatcatcatctattgcacaggggccttcctcatctcctgcatggtggggtcggtcatcgtctacaagatgaagagtggtaccaagaagagtgacttccacagccagatggctgtgcacaagctggccaagagcatccctctgcgcagacaggtaacagtgtctgctgactccagtgcatccatgaactctggggttcttctggttcggccatcacggctctcctccagtgggactcccatgctagcaggggtctctgagtatgagcttcccgaagaccctcgctgggagctgcctcgggacagactggtcttaggcaaacccctgggagagggctgctttgggcaggtggtgttggcagaggctatcgggctggacaaggacaaacccaaccgtgtgaccaaagtggctgtgaagatgttgaagtcggacgcaacagagaaagacttgtcagacctgatctcagaaatggagatgatgaagatgatcgggaagcataagaatatcatcaacctgctgggggcctgcacgcaggatggtcccttgtatgtcatcgtggagtatgcctccaagggcaacctgcgggagtacctgcaggcccggaggcccccagggctggaatactgctacaaccccagccacaacccagaggagcagctctcctccaaggacctggtgtcctgcgcctaccaggtggcccgaggcatggagtatctggcctccaagaagtgcatacaccgagacctggcagccaggaatgtcctggtgacagaggacaatgtgatgaagatagcagactttggcctcgcacgggacattcaccacatcgactactataaaaagacaaccaacggccgactgcctgtgaagtggatggcacccgaggcattatttgaccggatctacacccaccagagtgatgtgtggtctttcggggtgctcctgtgggagatcttcactctgggcggctccccataccccggtgtgcctgtggaggaacttttcaagctgctgaaggagggtcaccgcatggacaagcccagtaactgcaccaacgagctgtacatgatgatgcgggactgctggcatgcagtgccctcacagagacccaccttcaagcagctggtggaagacctggaccgcatcgtggccttgacctccaaccaggagtacctggacctgtccatgcccctggaccagtactcccccagctttcccgacacccggagctctacgtgctcctcaggggaggattccgtcttctctcatgagccgctgcccgaggagccctgcctgccccgacacccagcccagcttgccaatggcggactcaaacgccgctgactgccacccacacgccctccccagactccaccgtcagctgtaaccctcacccacagcccctgctgggcccaccacctgtccgtccctgtcccctttcctgctggcaggagccggctgcctaccaggggccttcctgtgtggcctgccttcaccccactcagctcacctctccctccacctcctctccacctgctggtgagaggtgcaaagaggcagatctttgctgccagccacttcatcccctcccagatgttggaccaacacccctccctgccaccaggcactgcctggagggcagggagtgggagccaatgaacaggcatgcaagtgagagcttcctgagctttctcctgtcggtttggtctgttttgccttcacccataagcccctcgcactctggtggcaggtgccttgtcctcagggctacagcagtagggaggtcagtgcttcgtgcctcgattgaaggtgacctctgccccagataggtggtgccagtggcttattaattccgatactagtttgctttgctgaccaaatgcctggtaccagaggatggtgaggcgaaggccaggttgggggcagtgttgtggccctggggcccagccccaaactgggggctctgtatatagctatgaagaaaacacaaagtgtataaatctgagtatatatttacatgtctttttaaaagggtcgttaccagagatttacccatcgggtaagatgctcctggtggctgggaggcatcagttgctatatattaaaaacaaaaaagaaaaaaaaggaaaatgtttttaaaaaggtcatatattttttgctacttttgctgttttatttttttaaattatgttctaaac

SEQ ID NO: 10485 - DNA, 2590 bp, Homo sapiens
  III.4113 (NM_023107)
cctcttgcggccacaggcgcggcgtcctcggcggcgggcggcagctagcgggagccgggacgccggtgcagccgcagcgcgcggaggaacccgggtgtgccgggagctgggcggccacgtccggacgggaccgagacccctcgtagcgcattgcggcgacctcgccttccccggccgcgagcgcgccgctgcttgaaaagccgcggaacccaaggacttttctccggtccgagctcggggcgccccgcaggcgcacggtacccgtgctgcagtcgggcacgccgcggcgccgggggcctccgcagggcgatggagccggtctgcaaggaaagtgaggcgccgccgctgcgttctggaggaggggggcacaaggtctggagaccccgggtggcggacgggagccctccccccgccccgcctccggggcaccagctccggctccattgttcccgcccgggctggaggcgccgagcaccgagcgccgccgggagtcgagcgccggccgcggagctcttgcgaccccgccaggacccgaacagagcccgggggcggcgggccggagccggggacgcgggcacacgcccgctcgcacaagccacggcggactctcccgaggcggaacctccacgccgagcgagggtcagtttgaaaaggaggatcgagctcactgtggagtatccatggagatgtggagccttgtcaccaacctctaactgcagaactgggatgtggagctggaagtgcctcctcttctgggctgtgctggtcacagccacactctgcaccgctaggccgtccccgaccttgcctgaacaagatgctctcccctcctcggaggatgatgatgatgatgatgactcctcttcagaggagaaagaaacagataacaccaaaccaaaccgtatgcccgtagctccatattggacatccccagaaaagatggaaaagaaattgcatgcagtgccggctgccaagacagtgaagttcaaatgcccttccagtgggaccccaaaccccacactgcgctggttgaaaaatggcaaagaattcaaacctgaccacagaattggaggctacaaggtccgttatgccacctggagcatcataatggactctgtggtgccctctgacaagggcaactacacctgcattgtggagaatgagtacggcagcatcaaccacacataccagctggatgtcgtggagcggtcccctcaccggcccatcctgcaagcagggttgcccgccaacaaaacagtggccctgggtagcaacgtggagttcatgtgtaaggtgtacagtgacccgcagccgcacatccagtggctaaagcacatcgaggtgaatgggagcaagattggcccagacaacctgccttatgtccagatcttgaaggtaatcatggcaccagtcttcgtgggccagtctactgggaaggagaccactgtctcgggggctcaagttcctgtgggcaggctcagttgcccccgaatgggatcattcctcacgcttcaggcacacacactccatctcagtagggatctagccacatcccccaggactagtaacagaggtcacaaagtggaggtgagctgggaacagagggctgcagggatgggtggtgctggtctgtaataagctttgagagcaacgtcactggggctttggggtcagctacacaaggaaggcatttggacccctgccttttcattgcccgaaaccagagcctttccaccaagcgtttcccagtcttagccctgtgttctgagttacgtacgatctttctggcaaatggggtgcatgataagagcatctcttacgaagagttggaaaaacaaatgccatatataaattctaagccatatgaggacgaggagtaatggcattttcttcctttttcctctcactcccagacattcattgtccctgaatgctccattaatccagggaaggtaattgcctaaatctccagtggatctcgcaacaggaaggaaccagaagctgggaaagttgtttacctctttgtcccagagttagacctcatcctcccctagcttagctgtctcagagatatactggccctcccttctcttctctttgctgctggtgctaaaactgctctgtaggtcattggccactgtctccactcacaacccctgctccagtcctggagggagtgggttaaacacaaatagaacattccatttgaagcagtgattctttttttttttttttttttttaatcaaatgctttggacttttgaagtccacttgttctgtacttgtaaaagggaaagaaggccgggcgcagtcgtcacgcctgtaatcccagcactttagatcacttgaggtcaggagtttgagaccagcccggccaacatggtgaaaccccatctctactaaaaatacaaaaattagctgtgcatagtggttggcacctgtagtcccagctactcaggaggctgaggcaagctaactgcttgaacccagaaggcagaggttgcagtgagctgagatcacgccactgcactccagcctgggtgacagagtgagtgagactctgcgttaaaaaaaaaaaaaaaaaaaaaaa

SEQ ID NO: 10486 - DNA, 2583 bp, Homo sapiens
  III.4114 (NM_023108)
cctcttgcggccacaggcgcggcgtcctcggcggcgggcggcagctagcgggagccgggacgccggtgcagccgcagcgcgcggaggaacccgggtgtgccgggagctgggcggccacgtccggacgggaccgagacccctcgtagcgcattgcggcgacctcgccttccccggccgcgagcgcgccgctgcttgaaaagccgcggaacccaaggacttttctccggtccgagctcggggcgccccgcaggcgacggtacccgtgctgcagtcgggcacgccgcgggcccggggcctccgcagggcgatggagcccggtctgcaaggaaagtgaggcgccgccgctgcgttctggaggaggggggcacaaggtctggagaccccgggtggcggacgggagccctccccccgccccgcctccggggcaccagctccggctccattgttcccgcccgggctggaggcgccgagcaccgagcgccgccgggagtcgagcgccggccgcggagctcttgcgaccccgccaggacccgaacagagcccgggggcggcgggccggagccggggacgcgggcacacgcccgctcgcacaagccacggcggactctcccgaggcggaacctccacgccgagcgagggtcagtttgaaaaggaggatcgagctcactgtggagtatccatggagatgtggagccttgtcaccaacctctaactgcagaactgggatgtggagctggaagtgcctcctcttctgggctgtgctggtcacagccacactctgcaccgctaggccgtccccgaccttgcctgaacaagatgctctcccctcctcggaggatgatgatgatgatgatgactcctcttcagaggagaaagaaacagataacaccaaaccaaaccccgtagctccatattggacatccccagaaaagatggaaaagaaattgcatgcagtgccggctgccaagacagtgaagttcaaatgcccttccagtgggaccccaaaccccacactgcgctggttgaaaaatggcaaagaattcaaacctgaccacagaattggaggctacaaggtccgttatgccacctggagcatcataatggactctgtggtgccctctgacaagggcaactacacctgcattgtggagaatgagtacggcagcatcaaccacacataccagctggatgtcgtggagcggtcccctcaccggcccatcctgcaagcagggttgcccgccaacaaaacagtggccctgggtagcaacgtggagttcatgtgtaaggtgtacagtgacccgcagccgcacatccagtggctaaagcacatcgaggtgaatgggagcaagattggcccagacaacctgccttatgtccagatcttgaaggtaatcatggcaccagtcttcgtgggccagtctactgggaaggagaccactgtctcgggggctcaagttcctgtgggcaggctcagttgcccccgaatgggatcattcctcacgcttcaggcacacacactccatctcagtagggatctagccacatcccccaggactagtaacagaggtcacaaagtggaggtgagctgggaacagagggctgcagggatgggtggtgctggtctgtaataagctttgagagcaacgtcactggggctttggggtcagctacacaaggaaggcatttggacccctgccttttcattgcccgaaaccagagcctttccaccaagcgtttcccagtcttagccctgtgtcctgagttacgtacgatctttctggcaaatggggtgcatgataagagcatctcttacgaagagttggaaaaacaaatgccatatataaattctaagccatatgaggacgaggagtaatggcattttcttcctttttcctctcactcccagacattcattgtccctgaatgctccattaatccagggaaggtaattgcctaaatctccagtggatctcgcaacaggaaggaaccagaagctgggaaagttgtttacctctttgtcccagagttagacctcatcctcccctagcttagctgtctcagagatatactggccctcccttctcttctctttgctgctggtgctaaaactgctctgtaggtcattggccactgtctccactcacaacccctgctccagtcctggagggagtgggttaaacacaaatagaacattccatttgaagcagtgattctttttttttttttttttttttaatcaaatgctttggacttttgaagtccacttgttctgtacttgtaaaagggaaagaaggccgggcgcagtcgtcacgcctgtaatcccagcactttagatcacttgaggtcaggagtttgagaccagcccggccaacatggtgaaaccccatctctactaaaaatacaaaaattagctgtgcatagtggttggcacctgtagtcccagctactcaggaggctgaggcaagctaactgcttgaacccagaaggcagaggttgcagtgagctgagatcacgccactgcactccagcctgggtgacagagtgagtgagactctgcgttaaaaaaaaaaaaaaaaaaaaaaa

SEQ ID NO: 10487 - DNA, 4066 bp, Homo sapiens
  III.4115 (NM_023109)
cctcttgcggccacaggcgcggcgtcctcggcggcgggcggcagctagcgggagccgggacgccggtgcagccgcagcgcgcggaggaacccgggtgtgccgggagctgggcggccacgtccggacgggaccgagacccctcgtagcgcattgcggcgacctcgccttccccggccgcgagcgcgccgctgcttgaaaagccgcggaacccaaggacttttctccggtccgagctcggggcgccccgcaggcgcacggtacccgtgctgcagtcgggcacgccgcggcgccgggggcctccgcagggcgatggagccggtctgcaaggaaagtgaggcgccgccgctgcgttctggaggaggggggcacaaggtctggagaccccgggtggcggacgggagccctccccccgccccgcctccggggcaccagctccggctccattgttcccgcccgggctggaggcgccgagcaccgagcgccgccgggagtcgagcgccggccgcggagctcttgcgaccccgccaggacccgaacagagcccgggggcggcgggccggagccggggacgcgggcacacgcccgctcgcacaagccacggcggactctcccgaggcggaacctccacgccgagcgagggtcagtttgaaaaggaggatcgagctcactgtggagtatccatggagatgtggagccttgtcaccaacctctaactgcagaactgggatgtggagctggaagtgcctcctcttctgggctgtgctggtcacagccacactctgcaccgctaggccgtgcccgaccttgcctgaacaagcccagccctggggagcccctgtggaagtggagtccttcctggtccacccgggtgacctgctgcagttgcgctgtcggctgcgggacgatgtgcagagcatcaactggctgcgggacggggtgcagctggcggaaagcaaccgcacccgcatcacaggggaggaggtggaggtgcaggactccgtgcccgcagactccggcctctatgcttgcgtaaccagcagcccctcgggcagtgacaccacctacttctccgtcaatgtttcagatgctctcccctcctcggaggatgatgatgatgatgatgactcctcttcagaggagaaagaaacagataacaccaaaccaaaccgtatgcccgtagctccatattggacatccccagaaaagatggaaaagaaattgcatgcagtgccggctgccaagacagtgaagttcaaatgcccttccagtgggaccccaaaccccacactgcgctggttgaaaaatggcaaagaattcaaacctgaccacagaattggaggctacaaggtccgttatgccacctggagcatcataatggactctgtggtgccctctgacaagggcaactacacctgcattgtggagaatgagtacggcagcatcaaccacacataccagctggatgtcgtggagcggtcccctcaccggcccatcctgcaagcagggttgcccgccaacaaaacagtggccctgggtagcaacgtggagttcatgtgtaaggtgtacagtgacccgcagccgcacatccagtggctaaagcacatcgaggtgaatgggagcaagattggcccagacaacctgccttatgcccagatcttgaagactgctggagttaataccaccgacaaagagatggaggtgcttcacttaagaaatgtctcctttgaggacgcaggggagtatacgtgcttggcgggtaactctatcggactctcccatcactctgcatggttgaccgttctggaagccctggaagagaggccggcagtgatgacctcgcccctgtacctggagatcatcatctattgcacaggggccttcctcatctcctgcatggtggggtcggtcatcgtctacaagatgaagagtggtaccaagaagagtgacttccacagccagatggctgtgcacaagctggccaagagcatccctctgcgcagacaggtaacagtgtctgctgactccagtgcatccatgaactctggggttcttctggttcggccatcacggctctcctccagtgggactcccatgctagcaggggtctctgagtatgagcttcccgaagaccctcgctgggagctgcctcgggacagactggtcttaggcaaacccctgggagagggctgctttgggcaggtggtgttggcagaggctatcgggctggacaaggacaaacccaaccgtgtgaccaaagtggctgtgaagatgttgaagtcggacgcaacagagaaagacttgtcagacctgatctcagaaatggagatgatgaagatgatcgggaagcataagaatatcatcaacctgctgggggcctgcacgcaggatggtcccttgtatgtcatcgtggagtatgcctccaagggcaacctgcgggagtacctgcaggcccggaggcccccagggctggaatactgctacaaccccagccacaacccagaggagcagctctcctccaaggacctggtgtcctgcgcctaccaggtggcccgaggcatggagtatctggcctccaagaaggtgtggaacctgaaggctcccctggtgcatacaccgagacctggcagccaggaatgtcctggtgacagaggacaatgtgatgaagatagcagactttggcctcgcacgggacattcaccacatcgactactataaaaagacaaccaacggccgactgcctgtgaagtggatggcacccgaggcattatttgaccggatctacacccaccagagtgatgtgtggtctttcggggtgctcctgtgggagatcttcactctgggcggctccccataccccggtgtgcctgtggaggaacttttcaagctgctgaaggagggtcaccgcatggacaagcccagtaactgcaccaacgagctgtacatgatgatgcgggactgctggcatgcagtgccctcacagagacccaccttcaagcagctggtggaagacctggaccgcatcgtggccttgacctccaaccaggagtacctggacctgtccatgcccctggaccagtactcccccagctttcccgacacccggagctctacgtgctcctcaggggaggattcggtcttctctcatgagccgctgcccgaggagccctgcctgccccgacacccagcccagcttgccaatggcggactcaaacgccgctgactgccacccacacgccctccccagactccaccgtcagctgtaaccctcacccacagcctgctgggcccaccacctgtccgtccctgtcccctttcctgctggcaggagccggctgcctaccaggggccttcctgtgtggcctgccttcaccccactcagctcacctctccctccacctcctctccacctgctggtgagaggtgcaaagaggcagatctttgctgccagccacttcatcccctcccagatgttggaccaacacccctccctgccacaggcactgcctggagggcagggagtgggagccaatgaacaggcatgcaagtgagagctttctgagctttctcctgtcggtttggtctgttttgccttcacccataagcccctcgcactctggtggcaggtgcttgtcctcagggctacagcagtagggaggtcagtgcttcgtgcctcgattgaaggtgacctctgccccagataggtggtgccagtggcttattaattccgatactagtttgctttgctgaccaaatgcctggtaccagaggatggtgaggcgaaggccaggttgggggcagtgttgtgccctgtcccagcccaaactgggggctctgtatatagctatgaagaaaacacaaagtgtataaatctgagtatatatttacatgtctttttaaaagggtcgttaccagagatttacccatcgggtaagatgctcctggtggctgggaggcatcagttgctatatattaaaaacaaaaaagaaaaaaaaggaaaatgtttttaaaaaggtcatatattttttgctacttttgctgttttatttttttaaattatgttctaaac

SEQ ID NO: 10488 - DNA, 1552 bp, Homo sapiens
  III.4116 (NM_023110)
cctcttgcggccacaggcgcggcgtcctcggcggcgggcggcagctagcgggagccgggacgccggtgcagccgcagcgcgcggaggaacccgggtgtgccgggagctgggcggccacgtccggacgggaccgagacccctcgtagcgcattgcggcgacctcgccttccccggccgcgagcgcgccgctgcttgaaaagccgcggaacccaaggacttttctccggtccgagctcggggcgccccgcaggcgcacggtacccgtgctgcagtcgggcacgccgcggcgccgggggcctccgcagggcgatggagccggtctgcaaggaaagtgaggcgccgccgctgcgttctggaggaggggggcacaaggtctggagaccccgggtggcggacgggagccctccccccgccccgcctccggggcaccagctccggctccattgttcccgcccgggctggaggcgccgagcaccgagcgccgccgggagtcgagcgccggccgcggagctcttgcgaccccgccaggacccgaacagagcccgggggcggcgggccggagccggggacgcgggcacacgcccgctcgcacaagccacggcggactctcccgaggcggaacctccacgccgagcgagggtcagtttgaaaaggaggatcgagctcactgtggagtatccatggagatgtggagccttgtcaccaacctctaactgcagaactgggatgtggagctggaagtgcctcctcttctgggctgtgctggtcacagccacactctgcaccgctaggccgtccccgaccttgcctgaacaagcccagccctggggagcccctgtggaagtggagtccttcctggtccaccccggtgacctgctgcagcttcgctgtcggctgcgggacgatgtgcagagcatcaactggctgcgggacggggtgcagctggcggaaagcaaccgcacccgcatcacaggggaggaggtggaggtgcaggactccgtgcccgcagactccggcctctatgcttgcgtaaccagcagcccctcgggcagtgacaccacctacttctccgtcaatgtttcagcttgcccagatctccaggaggctaagtggtgctcggccagcttccactccatcactcccttgccatttggacttggtactcggcttagtgattagaggccctgaacaggtggtggtatccctgctctgctggagaggaacccagatgctctcccctcctcggaggatgatgatgatgatgatgactcctcttcagaggagaaagaaacagataacaccaaaccaaaccccgtagctccatattggacatccccagaaaagatggaaaagaaattgcatgcagtgccggctgccaagacagtgaagttcaaatgcccttccagtgggaccccaaaccccacactgcgctggttgaaaaatggcaaagaattcaaacctgaccacagaattggaggctacaaggtccgttatgccacctggagcatcataatggactctgtggtgccctctgacaagggcaactacacct

SEQ ID NO: 10489 - DNA, 3938 bp, Homo sapiens
  III.4117 (NM_023111)
cctcttgcggccacaggcgcggcgtcctcggcggcgggcggcagctagcgggagccgggacgccggtgcagccgcagcgcgcggaggaacccgggtgtgccgggagctgggcggccacgtccggacgggaccgagacccctcgtagcgcattgcggcgacctcgccttccccggccgcgagcgcgccgctgcttgaaaagccgcggaacccaaggacttttctccggtccgagctcggggcgccccgcaggcgcacggtacccgtgctgcagtcgggcacgccgcggcgccgggggcctccgcagggcgatggagccggtctgcaaggaaagtgaggcgccgccgctgcgttctggaggaggggggcacaaggtctggagaccccgggtggcggacgggagccctccccccgccccgcctccggggcaccagctccggctccattgttcccgcccgggctggaggcgccgagcaccgagcgccgccgggagtcgagcgccggccgcggagctcttgcgaccccgccaggacccgaacagagcccgggggcggcgggccggagccggggacgcgggcacacgcccgctcgcacaagccacggcggactctcccgaggcggaacctccacgccgagcgagggtcagtttgaaaaggaggatcgagctcactgtggagtatccatggagatgtggagccttgtcaccaacctctaactgcagaactgggatgtggagctggaagtgcctcctcttctgggctgtgctggtcacagccacactctgcaccgctaggccgtccccgaccttgcctgaacaagcccagccctggggagcccctgtggaagtggagtccttcctggtccaccccggtgacctgctgcagcttcgctgtcggctgcgggacgatgtgcagagcatcaactggctgcgggacggggtgcagctggcggaaagcaaccgcacccgcatcacaggggaggaggtggaggtgcaggactccgtgcccgcagactccggcctctatgcttgcgtaaccagcagcccctcgggcagtgacaccacctacttctccgtcaatgtttcagatgctctcccctcctcggaggatgatgatgatgatgatgactcctcttcagaggagaaagaaacagataacaccaaaccaaaccgtatgcccgtagctccatattggacatccccagaaaagatggaaaagaaattgcatgcagtgccggctgccaagacagtgaagttcaaatgcccttccagtgggaccccaaaccccacactgcgctggttgaaaaatggcaaagaattcaaacctgaccacagaattggaggctacaaggtccgttatgccacctggagcatcataatggactctgtggtgccctctgacaagggcaactacacctgcattgtggagaatgagtacggcagcatcaaccacacataccagctggatgtcgtggagcggtcccctcaccggcccatcctgcaagcagggttgcccgccaacaaaacagtggccctgggtagcaacgtggagttcatgtgtaaggtgtacagtgacccgcagccgcacatccagtggctaaagcacatcgaggtgaatgggagcaagattggcccagacaacctgccttatgtccagatcttgaagactgctggagttaataccaccgacaaagagatggaggtgcttcacttaagaaatgtctcctttgaggacgcaggggagtatacgtgcttggcgggtaactctatcggactctcccatcactctgcatggttgaccgttctggaagccctggaagagaggccggcagtgatgacctcgcccctgtacctggagatcatcatctattgcacaggggccttcctcatctcctgcatggtggggtcggtcatcgtctacaagatgaagagtggtaccaagaagagtgacttccacagccagatggctgtgcacaagctggccaagagcatccctctgcgcagacaggtaacagtgtctgctgactccagtgcatccatgaactctggggttcttctggttcggccatcacggctctcctccagtgggactcccatgctagcaggggtctctgagtatgagcttcccgaagaccctcgctgggagctgcctcgggacagactggtcttaggcaaacccctgggagagggctgctttgggcaggtggtgttggcagaggctatcgggctggacaaggacaaacccaaccgtgtgaccaaagtggctgtgaagatgttgaagtcggacgcaacagagaaagacttgtcagacctgatctcagaaatggagatgatgaagatgatcgggaagcataagaatatcatcaacctgctgggggcctgcacgcaggatggtcccttgtatgtcatcgtggagtatgcctccaagggcaacctgcgggagtacctgcaggcccggaggcccccagggctggaatactgctacaaccccagccacaacccagaggagcagctctcctccaaggacctggtgtcctgcgcctaccaggtggcccgaggcatggagtatctggcctccaagaagtgcatacaccgagacctggcagccaggaatgtcctggtgacagaggacaatgtgatgaagatagcagactttggcctcgcacgggacattcaccacatcgactactataaaaagacaaccaacggccgactgcctgtgaagtggatggcacccgaggcattatttgaccggatctacacccaccagagtgatgtgtggtctttcggggtgctcctgtgggagatcttcactctgggcggctccccataccccggtgtgcctgtggaggaacttttcaagcagctggtggaagacctggaccgcatcgtggccttgacctccaaccaggagtacctggacctgtccatgcccctggaccagtactcccccagctttcccgacacccggagctctacgtgctcctcaggggaggattccgtcttctctcatgagccgctgcccgaggagccctgcctgccccgacacccagcccagcttgccaatggcggactcaaacgccgctgactgccacccacacgccctccccagactccaccgtcagctgtaaccctcacccacagcccctgctgggcccaccacctgtccgtccctgtcccctttcctgctggcaggagccggctgcctaccaggggccttcctgtgtggcctgccttcaccccactcagctcacctctccctccacctcctctccacctgctggtgagaggtgcaaagaggcagatctttgctgccagccacttcatcccctcccagatgttggaccaacacccctccctgccaccaggcactgcctggagggcagggagtgggagccaatgaacaggcatgcaagtgagagcttcctgagctttctcctgtcggtttggtctgttttgccttcacccataagcccctcgcactctggtggcaggtgccttgtcctcagggctacagcagtagggaggtcagtgcttcgtgcctcgattgaaggtgacctctgccccagataggtggtgccagtggcttattaattccgatactagtttgctttgctgaccaaatgcctggtaccagaggatggtgaggcgaaggccaggttgggggcagtgttgtggccctggggcccagccccaaactgggggctctgtatatagctatgaagaaaacacaaagtgtataaatctgagtatatatttacatgtctttttaaaagggtcgttaccagagatttacccatcgggtaagatgctcctggtggctgggaggcatcagttgctatatattaaaaacaaaaaagaaaaaaaaggaaaatgtttttaaaaaggtcatatattttttgctacttttgctgttttatttttttaaattatgttctaaac

SEQ ID NO: 10490 - DNA, 4587 bp, Homo sapiens
  III.4118 (NM_000141)
gagcgggcgagggagcgcgcgcggccgccacaaagctcgggcgccgcggggctgcatgcggcgtacctggcccggcgcggcgactgctctccgggctggcgggggccggccgcgagccccgggggccccgaggccgcagcttgcctgcgcgctctgagccttcgcaactcgcgagcaaagtttggtggaggcaacgccaagcctgagtcctttcttcctctcgttccccaaatccgagggcagcccgcgggcgtcatgcccgcgctcctccgcagcctggggtacgcgtgaagcccgggaggcttggcgccggcgaagacccaaggaccactcttctgcgtttggagttgctccccacaaccccgggctcgtcgctttctccatcccgacccacgcggggcgcggggacaacacaggtcgcggaggagcgttgccattcaagtgactgcagcagcagcggcagcgcctcggttcctgagcccaccgcaggctgaaggcattgcgcgtagtccatgcccgtagaggaagtgtgcagatgggattaacgtccacatggagatatggaagaggaccggggattggtaccgtaaccatggtcagctggggtcgtttcatctgcctggtcgtggtcaccatggcaaccttgtccctggcccggccctccttcagtttagttgaggataccacattagagccagaagagccaccaaccaaataccaaatctctcaaccagaagtgtacgtggctgcgccaggggagtcgctagaggtgcgctgcctgttgaaagatgccgccgtgatcagttggactaaggatggggtgcacttggggcccaacaataggacagtgcttattggggagtacttgcagataaagggcgccacgcctagagactccggcctctatgcttgtactgccagtaggactgtagacagtgaaacttggtacttcatggtgaatgtcacagatgccatctcatccggagatgatgaggatgacaccgatggtgcggaagattttgtcagtgagaacagtaacaacaagagagcaccatactggaccaacacagaaaagatggaaaagcggctccatgctgtgcctgcggccaacactgtcaagtttcgctgcccagccggggggaacccaatgccaaccatgcggtggctgaaaaacgggaaggagtttaagcaggagcatcgcattggaggctacaaggtacgaaaccagcactggagcctcattatggaaagtgtggtcccatctgacaagggaaattatacctgtgtggtggagaatgaatacgggtccatcaatcacacgtaccacctggatgttgtggagcgatcgcctcaccggcccatcctccaagccggactgccggcaaatgcctccacagtggtcggaggagacgtagagtttgtctgcaaggtttacagtgatgcccagccccacatccagtggatcaagcacgtggaaaagaacggcagtaaatacgggcccgacgggctgccctacctcaaggttctcaaggccgccggtgttaacaccacggacaaagagattgaggttctctatattcggaatgtaacttttgaggacgctggggaatatacgtgcttggcgggtaattctattgggatatcctttcactctgcatggttgacagttctgccagcgcctggaagagaaaaggagattacagcttccccagactacctggagatagccatttactgcataggggtcttcttaatcgcctgtatggtggtaacagtcatcctgtgccgaatgaagaacacgaccaagaagccagacttcagcagccagccggctgtgcacaagctgaccaaacgtatccccctgcggagacaggtaacagtttcggctgagtccagctcctccatgaactccaacaccccgctggtgaggataacaacacgcctctcttcaacggcagacacccccatgctggcaggggtctccgagtatgaacttccagaggacccaaaatgggagtttccaagagataagctgacactgggcaagcccctgggagaaggttgctttgggcaagtggtcatggcggaagcagtgggaattgacaaagacaagcccaaggaggcggtcaccgtggccgtgaagatgttgaaagatgatgccacagagaaagacctttctgatctggtgtcagagatggagatgatgaagatgattgggaaacacaagaatatcataaatcttcttggagcctgcacacaggatgggcctctctatgtcatagttgagtatgcctctaaaggcaacctccgagaatacctccgagcccggaggccacccgggatggagtactcctatgacattaaccgtgttcctgaggagcagatgaccttcaaggacttggtgtcatgcacctaccagctggccagaggcatggagtacttggcttcccaaaaatgtattcatcgagatttagcagccagaaatgttttggtaacagaaaacaatgtgatgaaaatagcagactttggactcgccagagatatcaacaatatagactattacaaaaagaccaccaatgggcggcttccagtcaagtggatggctccagaagccctgtttgatagagtatacactcatcagagtgatgtctggtccttcggggtgttaatgtgggagatcttcactttagggggctcgccctacccagggattcccgtggaggaactttttaagctgctgaaggaaggacacagaatggataagccagccaactgcaccaacgaactgtacatgatgatgagggactgttggcatgcagtgccctcccagagaccaacgttcaagcagttggtagaagacttggatcgaattctcactctcacaaccaatgaggaatacttggacctcagccaacctctcgaacagtattcacctagttaccctgacacaagaagttcttgttcttcaggagatgattctgttttttctccagaccccatgccttacgaaccatgccttcctcagtatccacacataaacggcagtgttaaaacatgaatgactgtgtctgcctgtccccaaacaggacagcactgggaacctagctacactgagcagggagaccatgcctcccagagcttgttgtctccacttgtatatatggatcagaggagtaaataattggaaaagtaatcagcatatgtgtaaagatttatacagttgaaaacttgtaatcttccccaggaggagaagaaggtttctggagcagtggactgccacaagccaccatgtaacccctctcacctgccgtgcgtactggctgtggaccagtaggactcaaggtggacgtgcgttctgccttccttgttaattttgtaataattggagaagatttatgtcagcacacacttacagagcacaaatgcagtatataggtgctggatgtatgtaaatatattcaaattatgtataaatatatattatatatttacaaggagttattttttgtattgattttaaatggatgtcccaatgcacctagaaaattggtctctctttttttaatagctatttgctaaatgctgttcttacacataatttcttaattttcaccgagcagaggtggaaaaatacttttgctttcagggaaaatggtataacgttaatttattaataaattggtaatatacaaaacaattaatcatttatagttttttttgtaatttaagtggcatttctatgcaggcagcacagcagactagttaatctattgcttggacttaactagttatcagatcctttgaaaagagaatatttacaatatatgactaatttggggaaaatgaagttttgatttatttgtgtttaaatgctgctgtcagacgattgttcttagacctcctaaatgccccatattaaaagaactcattcataggaaggtgtttcattttggtgtgcaaccctgtcattacgtcaacgcaacgtctaactggacttcccaagataaatggtaccagcgtcctcttaaaagatgccttaatccattccttgaggacagaccttagttgaaatgatagcagaatgtgcttctctctggcagctggccttctgcttctgagttgcacattaatcagattagcctgattctcttcagtgaattttgataatggcttccagactctttgcgttggagacgcctgttaggatcttcaagtcccatcatagaaaattgaaacacagagttgttctgctgatagttttggggatacgtccatctttttaagggattgctttcatctaattctggcaggacctcaccaaaagatccagcctcatacctacatcagacaaaatatcgccgttgttccttctgtactaaagtattgtgttttgctttggaaacacccactcactttgcaatagccgtgcaagatgaatgcagattacactgatcttatgtgttacaaaattggagaaagtatttaataaaacctgttaatttttatactgacaataaaaatgtttctacagatattaatgttaacaagacaaaataaatgtcacgcaacttaaaaaaaaaaaaaaaa

SEQ ID NO: 10491 - DNA, 4574 bp, Homo sapiens
  III.4119 (NM_022969)
gagcgggcgagggagcgcgcgcggccgccacaaagctcgggcgccgcggggctgcatgcggcgtacctggcccggcgcggcgactgctctccgggctggcgggggccggccgcgagccccgggggccccgaggccgcagcttgcctgcgcgctctgagccttcgcaactcgcgagcaaagtttggtggaggcaacgccaagcctgagtcctttcttcctctcgttccccaaatccgaggcagcccgcgggcgtcatgcccgcgctcctccgcagcctggggtacgcgctgaagcccgggaggcttggcgccggcgaagacccaaggaccactcttctgcgtttggagttgctccccacaaccccgggctcgtcgctttctccatcccgacccagccggggcgcggggacaacacaggtcgcggaggagcgttgccattcaagtgactgcagcagcagcggcagcgcctcggttcctgagcccaccgcaggctgaaggcattgcgcgtagtccatgcccgtagaggaagtgtgcagatgggattaacgtccacatggagatatggaagaggaccggggattggtaccgtaaccatggtcagctggggtcgtttcatctgcctggtcgtggtcaccatggcaaccttgtccctggcccggccctccttcagtttagttgaggataccacattagagccagaagagccaccaaccaaataccaaatctctcaaccagaagtgtacgtggctgcgccaggggagtcgctagaggtgcgctgcctgttgaaagatgccgccgtgatcagttggactaaggatggggtgcacttggggcccaacaataggacagtgcttattggggagtacttgcagataaagggcgccacgcctagagactccggcctctatgcttgtactgccagtaggactgtagacagtgaaacttggtacttcatggtgaatgtcacagatgccatctcatccggagatgatgaggatgacaccgatggtgcggaagattttgtcagtgagaacagtaacaacaagagagcaccatactggaccaacacagaaaagatggaaaagcggctccatgctgtgcctgcggccaacactgtcaagtttcgctgcccagccggggggaacccaatgccaaccatgcggtggctgaaaaacgggaaggagtttaagcaggagcatcgcattggaggctacaaggtacgaaaccagcactggagcctcattatggaaagtgtggtcccatctgacaagggaaattatacctgtgtggtggagaatgaatacgggtccatcaatcacacgtaccacctggatgttgtggagcgatcgcctcaccggcccatcctccaagccggactgccggcaaatgcctccacagtggtcggaggagacgtagagtttgtctgcaaggtttacagtgatgcccagccccacatccagtggatcaagcacgtggaaaagaacggcagtaaatacgggcccgacgggctgccctacctcaaggttctcaagcactcggggataaatagttccaatgcagaagtgctggctctgttcaatgtgaccgaggcggatgctggggaatatatatgtaaggtctccaattatatagggcaggccaaccagtctgcctggctcactgtcctgccaaaacagcaagcgcctggaagagaaaaggagattacagcttccccagactacctggagatagccatttactgcataggggtcttcttaatcgcctgtatggtggtaacagtcatcctgtgccgaatgaagaacacgaccaagaagccagacttcagcagccagccggctgtgcacaagctgaccaaacgtatccccctgcggagacaggtaacagtttcggctgagtccagctcctccatgaactccaacaccccgctggtgaggataacaacacgcctctcttcaacggcagacacccccatgctggcaggggtctccgagtatgaacttccagaggacccaaaatgggagtttccaagagataagctgacactgggcaagcccctgggagaaggttgctttgggcaagtggtcatggcggaagcagtgggaattgacaaagacaagcccaaggaggcggtcaccgtggccgtgaagatgttgaaagatgatgccacagagaaagacctttctgatctggtgtcagagatggagatgatgaagatgattgggaaacacaagaatatcataaatcttcttggagcctgcacacaggatgggcctctctatgtcatagttgagtatgcctctaaaggcaacctccgagaatacctccgagcccggaggccacccgggatggagtactcctatgacattaaccgtgttcctgaggagcagatgaccttcaaggacttggtgtcatgcacctaccagctggccagaggcatggagtacttggcttcccaaaaatgtattcatcgagatttagcagccagaaatgttttggtaacagaaaacaatgtgatgaaaatagcagactttggactcgccagagatatcaacaatatagactattacaaaaagaccaccaatgggcggcttccagtcaagtggatggctccagaagccctgtttgatagagtatacactcatcagagtgatgtctggtccttcggggtgttaatgtgggagatcttcactttagggggctcgccctacccagggattcccgtggaggaactttttaagctgctgaaggaaggacacagaatggataagccagccaactgcaccaacgaactgtacatgatgatgagggactgttggcatgcagtgccctcccagagaccaacgttcaagcagttggtagaagacttggatcgaattctcactctcacaaccaatgaggaatacttggacctcagccaacctctcgaacagtattcacctagttaccctgacacaagaagttcttgttcttcaggagatgattctgttttttctccagaccccatgccttacgaaccatgccttcctcagtatccacacataaacggcagtgttaaaacatgaatgactgtgtctgcctgtccccaaacaggacagcactgggaacctagctacactgagcagggagaccatgcctcccagagcttgttgtctccacttgtatatatggatcagaggagtaaataattggaaaagtaatcagcatatgtgtaaagatttatacagttgaaaacttgtaatcttccccaggaggagaagaaggtttctggagcagtggactgccacaagccaccatgtaacccctctcacctgccgtgcgtactggctgtggaccagtaggactcaaggtggacgtgcgttctgccttccttgttaattttgtaataattggagaagatttatgtcagcacacacttacagagcacaaatgcagtatataggtgctggatgtatgtaaatatattcaaattatgtataaatatatattatatatttacaaggagttattttttgtattgattttaaatggatgtcccaatgcacctagaaaattggtctctctttttttaatagctatttgctaaatgctgttcttacacataatttcttaattttcaccgagcagaggtggaaaaatacttttgctttcagggaaaatggtataacgttaatttattaataaattggtaatatacaaaacaattaatcatttatagttttttttgtaatttaagtggcatttctatgcaggcagcacagcagactagttaatctattgcttggacttaactagttatcagatcctttgaaaagagaatatttacaatatatgactaatttggggaaaatgaagttttgatttatttgtgtttaaatgctgctgtcagacgattgttcttagacctcctaaatgccccatattaaaagaactcattcataggaaggtgtttcattttggtgtgcaaccctgtcattacgtcaacgcaacgtctaactggacttcccaagataaatggtaccagcgtcctcttaaaagatgccttaatccattccttgaggacagaccttagttgaaatgatagcagaatgtgcttctctctggcagctggccttctgcttctgagttgcacattaatcagattagcctgattctcttcagtgaattttgataatggcttccagactctttgcgttggagacgcctgttaggatcttcaagtcccatcatagaaaattgaaacacagagttgttctgctgatagttttggggatacgtccatctttttaagggattgctttcatctaattctggcaggacctcaccaaaagatccagcctcatacctacatcagacaaaatatcgccgttgttccttctgtactaaagtattgtgttttgctttggaaacacccactcactttgcaatagccgtgcaagatgaatgcagattacactgatcttatgtgttacaaaattggagaaagtatttaataaaacctgttaatttttatactgacaataaaaatgtttctacagatattaatgttaacaagacaaaataaatgtcacgcaactt

SEQ ID NO: 10492 - DNA, 4223 bp, Homo sapiens
  III.4120 (NM_022970)
gagcgggcgagggagcgcgcgcggccgccacaaagctcgggcgccgcggggctgcatgcggcgtacctggcccggcgcggcgactgctctccgggctggcgggggccggccgcgagccccgggggccccgaggccgcagcttgcctgcgcgctctgagccttcgcaactcgcgagcaaagtttggtggaggcaacgccaagcctgagtcctttcttcctctcgttccccaaatccgagggcagcccgcgggcgtcatgcccgcgctcctccgcagcctggggtacgcgtgaagcccgggaggcttggcgccggcgaagacccaaggaccactcttctgcgtttggagttgctccccccaaccccgggctcgtcgctttctccatcccgacccacgcggggcgcggggacaacacaggtcgcggaggagcgttgccattcaagtgactgcagcagcagcggcagcgcctcggttcctgagcccaccgcaggctgaaggcattgcgcgtagtccatgcccgtagaggaagtgtgcagatgggattaacgtccacatggagatatggaagaggaccggggattggtaccgtaaccatggtcagctggggtcgtttcatctgcctggtcgtggtcaccatggcaaccttgtccctggcccggccctccttcagtttagttgaggataccacattagagccagaagagccaccaaccaaataccaaatctctcaaccagaagtgtacgtggctgcgccaggggagtcgctagaggtgcgctgcctgttgaaagatgccgccgtgatcagttggactaaggatggggtgcacttggggcccaacaataggacagtgcttattggggagtacttgcagataaagggcgccacgcctagagactccggcctctatgcttgtactgccagtaggactgtagacagtgaaacttggtacttcatggtgaatgtcacagatgccatctcatccggagatgatgaggatgacaccgatggtgcggaagattttgtcagtgagaacagtaacaacaagagagcaccatactggaccaacacagaaaagatggaaaagcggctccatgctgtgcctgcggccaacactgtcaagtttcgctgcccagccggggggaacccaatgccaaccatgcggtggctgaaaaacgggaaggagtttaagcaggagcatcgcattggaggctacaaggtacgaaaccagcactggagcctcattatggaaagtgtggtcccatctgacaagggaaattatacctgtgtggtggagaatgaatacgggtccatcaatcacacgtaccacctggatgttgtggagcgatcgcctcaccggcccatcctccaagccggactgccggcaaatgcctccacagtggtcggaggagacgtagagtttgtctgcaaggtttacagtgatgcccagccccacatccagtggatcaagcacgtggaaaagaacggcagtaaatacgggcccgacgggctgccctacctcaaggttctcaaggtttcggctgagtccagctcctccatgaactccaacaccccgctggtgaggataacaacacgcctctcttcaacggcagacacccccatgctggcaggggtctccgagtatgaacttccagaggacccaaaatgggagtttccaagagataagctgacactgggcaagcccctgggagaaggttgctttgggcaagtggtcatggcggaagcagtgggaattgacaaagacaagcccaaggaggcggtcaccgtggccgtgaagatgttgaaagatgatgccacagagaaagacctttctgatctggtgtcagagatggagatgatgaagatgattgggaaacacaagaatatcataaatcttcttggagcctgcacacaggatgggcctctctatgtcatagttgagtatgcctctaaaggcaacctccgagaatacctccgagcccggaggccacccgggatggagtactcctatgacattaaccgtgttcctgaggagcagatgaccttcaaggacttggtgtcatgcacctaccagctggccagaggcatggagtacttggcttcccaaaaatgtattcatcgagatttagcagccagaaatgttttggtaacagaaaacaatgtgatgaaaatagcagactttggactcgccagagatatcaacaatatagactattacaaaaagaccaccaatgggcggcttccagtcaagtggatggctccagaagccctgtttgatagagtatacactcatcagagtgatgtctggtccttcggggtgttaatgtgggagatcttcactttagggggctcgccctacccagggattcccgtggaggaactttttaagctgctgaaggaaggacacagaatggataagccagccaactgcaccaacgaactgtacatgatgatgagggactgttggcatgcagtgccctcccagagaccaacgttcaagcagttggtagaagacttggatcgaattctcactctcacaaccaatgaggaatacttggacctcagccaacctctcgaacagtattcacctagttaccctgacacaagaagttcttgttcttcaggagatgattctgttttttctccagaccccatgccttacgaaccatgccttcctcagtatccacacataaacggcagtgttaaaacatgaatgactgtgtctgcctgtccccaaacaggacagcactgggaacctagctacactgagcagggagaccatgcctcccagagcttgttgtctccacttgtatatatggatcagaggagtaaataattggaaaagtaatcagcatatgtgtaaagatttatacagttgaaaacttgtaatcttccccaggaggagaagaaggtttctggagcagtggactgccacaagccaccatgtaacccctctcacctgccgtgcgtactggctgtggaccagtaggactcaaggtggacgtgcgttctgccttccttgttaattttgtaataattggagaagatttatgtcagcacacacttacagagcacaaatgcagtatataggtgctggatgtatgtaaatatattcaaattatgtataaatatatattatatatttacaaggagttattttttgtattgattttaaatggatgtcccaatgcacctagaaaattggtctctctttttttaatagctatttgctaaatgctgttcttacacataatttcttaattttcaccgagcagaggtggaaaaatacttttgctttcagggaaaatggtataacgttaatttattaataaattggtaatatacaaaacaattaatcatttatagttttttttgtaatttaagtggcatttctatgcaggcagcacagcagactagttaatctattgcttggacttaactagttatcagatcctttgaaaagagaatatttacaatatatgactaatttggggaaaatgaagttttgatttatttgtgtttaaatgctgctgtcagacgattgttcttagacctcctaaatgccccatattaaaagaactcattcataggaaggtgtttcattttggtgtgcaaccctgtcattacgtcaacgcaacgtctaactggacttcccaagataaatggtaccagcgtcctcttaaaagatgccttaatccattccttgaggacagaccttagttgaaatgatagcagaatgtgcttctctctggcagctggccttctgcttctgagttgcacattaatcagattagcctgattctcttcagtgaattttgataatggcttccagactctttgcgttggagacgcctgttaggatcttcaagtcccatcatagaaaattgaaacacagagttgttctgctgatagttttggggatacgtccatctttttaagggattgctttcatctaattctggcaggacctcaccaaaagatccagcctcatacctacatcagacaaaatatcgccgttgttccttctgtactaaagtattgtgttttgctttggaaacacccactcactttgcaatagccgtgcaagatgaatgcagattacactgatcttatgtgttacaaaattggagaaagtatttaataaaacctgttaatttttatactgacaataaaaatgtttctacagatattaatgttaacaagacaaaataaatgtcacgcaactt

SEQ ID NO: 10493 - DNA, 1859 bp, Homo sapiens
  III.4121 (NM_022971)
gagcgggcgagggagcgcgcgcggccgccacaaagctcgggcgccgcggggctgcatgcggcgtacctggcccggcgcggcgactgctctccgggctggcgggggccggccgcgagccccgggggccccgaggccgcagcttgcctgcgcgctctgagccttcgcaactcgcgagcaaagtttggtggaggcaacgccaagcctgagtcctttcttcctctcgttccccaaatccgagggcagcccgcgggcgtcatgcccgcgctcctccgcagcctggggtacgcgctgaagcccgggaggcttggcgccggcgaagacccaaggaccactcttctgcgtttggagttgctccccacaaccccgggctcgtcgctttctccatcccgacccacgcggggcgcggggacaacacaggtcgcggaggagcgttgccattcaagtgactgcagcagcagcggcagcgcctcggttcctgagcccaccgcaggctgaaggcattgcgcgtagtccatgcccgtagaggaagtgtgcagatgggattaacgtccacatggagatatggaagaggaccggggattggtaccgtaaccatggtcagctggggtcgtttcatctgcctggtcgtggtcaccatggcaaccttgtccctggcccggccctccttcagtttagttgaggataccacattagagccagaagagccaccaaccaaataccaaatctctcaaccagaagtgtacgtggctgcgccaggggagtcgctagaggtgcgctgcctgttgaaagatgccgccgtgatcagttggactaaggatggggtgcacttggggcccaacaataggacagtgcttattggggagtacttgcagataaagggcgccacgcctagagactccggcctctatgcttgtactgccagtaggactgtagacagtgaaacttggtacttcatggtgaatgtcacagatgccatctcatccggagatgatgaggatgacaccgatggtgcggaagattttgtcagtgagaacagtaacaacaagagagcaccatactggaccaacacagaaaagatggaaaagcggctccatgctgtgcctgcggccaacactgtcaagtttcgctgcccagccggggggaacccaatgccaaccatgcggtggctgaaaaacgggaaggagtttaagcaggagcatcgcattggaggctacaaggtacgaaaccagcactggagcctcattatggaaagtgtggtcccatctgacaagggaaattatacctgtgtggtggagaatgaatacgggtccatcaatcacacgtaccacctggatgttgtgggcagccagggtttatgagctttgcatgatcctcatggttcccaagcgtcatctgtgtaaagtggacgtggtatgaaatgtctgacattttggaagctgagattactctgaaaatgttaattgggcaggtgaaaagggtacagatgtgctgtagcagacctttggttttaaaagagaagcatcatttccccaacagggcaactgtagaaggccagctgaagagtaaaggaaaaggtctgaggactgagcctgtggctggctggaaaaaggtgaatgttgagggcccttcacttccatcacaagaaagtcattagacggtaccaattcagtgtctgttcctggcatctatttcctctgtgcaaagggaaccatgtatatgagcttataaatacatttttgtcagagtgcacagataagtaggccattttaattaaacattgaagaccctgtctcaaaaaaaaaaaaaaaaaaagaaaagaaaagaataaagaaaaaacccattactccaagacgtttagc

SEQ ID NO: 10494 - DNA, 4575 bp, Homo sapiens
  III.4122 (NM_022972)
gagcgggcgagggagcgcgcgcggccgccacaaagctcgggcgccgcggggctgcatgcggcgtacctggcccggcgcggcgactgctctccgggctggcgggggccggccgcgagccccgggggccccgaggccgcagcttgcctgcgcgctctgagccttcgcaactcgcgagcaaagtttggtggaggcaacgccaagcctgagtcctttcttcctctcgttccccaaatccgagggcagcccgcgggcgtcatgcccgcgctcctccgcagcctggggtacgcgctgaagcccgggaggcttggcgccggcgaagacccaaggaccactcttctgcgtttggagttgctccccacaaccccgggctcgtcgctttctccatcccgacccagccggggcgcggggacaacacaggtcgcggaggagcgttgccattcaagtgactgcagcagcagcggcagcgcctcggttcctgagcccaccgcaggctgaaggcattgcgcgtagtccatgcccgtagaggaagtgtgcagatgggattaacgtccacatggagatatggaagaggaccggggattggtaccgtaaccatggtcagctggggtcgtttcatctgcctggtcgtggtcaccatggcaaccttgtccctggcccggccctccttcagtttagttgaggataccacattagagccagaagagccaccaaccaaataccaaatctctcaaccagaagtgtacgtggctgcgccaggggagtcgctagaggtgcgctgcctgttgaaagatgccgccgtgatcagttggactaaggatggggtgcacttggggcccaacaataggacagtgcttattggggagtacttgcagataaagggcgccacgcctagagactccggcctctatgcttgtactgccagtaggactgtagacagtgaaacttggtacttcatggtgaatgtcacagatgccatctcatccggagatgatgaggatgacaccgatggtgcggaagattttgtcagtgagaacagtaacaacaagagagcaccatactggaccaacacagaaaagatggaaaagcggctccatgctgtgcctgcggccaacactgtcaagtttcgctgcccagccggggggaacccaatgccaaccatgcggtggctgaaaaacgggaaggagtttaagcaggagcatcgcattggaggctacaaggtacgaaaccagcactggagcctcattatggaaagtgtggtcccatctgacaagggaaattatacctgtgtggtggagaatgaatacgggtccatcaatcacacgtaccacctggatgttgtggagcgatcgcctcaccggcccatcctccaagccggactgccggcaaatgcctccacagtggtcggaggagacgtagagtttgtctgcaaggtttacagtgatgcccagccccacatccagtggatcaagcacgtggaaaagaacggcagtaaatacgggcccgacgggctgccctacctcaaggttctcaaggttctcaaggccgccggtgttaacaccacggacaaagagattgaggttctctatattcggaatgtaacttttgaggacgctggggaatatacgtgcttggcgggtaattctattgggatatcctttcactctgcatggttgacagttctgccagcgcctggaagagaaaaggagattacagcttccccagactacctggagatagccatttactgcataggggtcttcttaatcgcctgtatggtggtaacagtcatcctgtgccgaatgaagaacacgaccaagaagccagacttcagcagccagccggctgtgcacaagctgaccaaacgtatccccctgcggagacaggtttcggctgagtccagctcctccatgaactccaacaccccgctggtgaggataacaacacgcctctcttcaacggcagacacccccatgctggcaggggtctccgagtatgaacttccagaggacccaaaatgggagtttccaagagataagctgacactgggcaagcccctgggagaaggttgctttgggcaagtggtcatggcggaagcagtgggaattgacaaagacaagcccaaggaggcggtcaccgtggccgtgaagatgttgaaagatgatgccacagagaaagacctttctgatctggtgtcagagatggagatgatgaagatgattgggaaacacaagaatatcataaatcttcttggagcctgcacacaggatgggcctctctatgtcatagttgagtatgcctctaaaggcaacctccgagaatacctccgagcccggaggccacccgggatggagtactcctatgacattaaccgtgttcctgaggagcagatgaccttcaaggacttggtgtcatgcacctaccagctggccagaggcatggagtacttggcttcccaaaaatgtattcatcgagatttagcagccagaaatgttttggtaacagaaaacaatgtgatgaaaatagcagactttggactcgccagagatatcaacaatatagactattacaaaaagaccaccaatgggcggcttccagtcaagtggatggctccagaagccctgtttgatagagtatacactcatcagagtgatgtctggtccttcggggtgttaatgtgggagatcttcactttagggggctcgccctacccagggattcccgtggaggaactttttaagctgctgaaggaaggacacagaatggataagccagccaactgcaccaacgaactgtacatgatgatgagggactgttggcatgcagtgccctcccagagaccaacgttcaagcagttggtagaagacttggatcgaattctcactctcacaaccaatgaggaatacttggacctcagccaacctctcgaacagtattcacctagttaccctgacacaagaagttcttgttcttcaggagatgattctgttttttctccagaccccatgccttacgaaccatgccttcctcagtatccacacataaacggcagtgttaaaacatgaatgactgtgtctgcctgtccccaaacaggacagcactgggaacctagctacactgagcagggagaccatgcctcccagagcttgttgtctccacttgtatatatggatcagaggagtaaataattggaaaagtaatcagcatatgtgtaaagatttatacagttgaaaacttgtaatcttccccaggaggagaagaaggtttctggagcagtggactgccacaagccaccatgtaacccctctcacctgccgtgcgtactggctgtggaccagtaggactcaaggtggacgtgcgttctgccttccttgttaattttgtaataattggagaagatttatgtcagcacacacttacagagcacaaatgcagtatataggtgctggatgtatgtaaatatattcaaattatgtataaatatatattatatatttacaaggagttattttttgtattgattttaaatggatgtcccaatgcacctagaaaattggtctctctttttttaatagctatttgctaaatgctgttcttacacataatttcttaattttcaccgagcagaggtggaaaaatacttttgctttcagggaaaatggtataacgttaatttattaataaattggtaatatacaaaacaattaatcatttatagttttttttgtaatttaagtggcatttctatgcaggcagcacagcagactagttaatctattgcttggacttaactagttatcagatcctttgaaaagagaatatttacaatatatgactaatttggggaaaatgaagttttgatttatttgtgtttaaatgctgctgtcagacgattgttcttagacctcctaaatgccccatattaaaagaactcattcataggaaggtgtttcattttggtgtgcaaccctgtcattacgtcaacgcaacgtctaactggacttcccaagataaatggtaccagcgtcctcttaaaagatgccttaatccattccttgaggacagaccttagttgaaatgatagcagaatgtgcttctctctggcagctggccttctgcttctgagttgcacattaatcagattagcctgattctcttcagtgaattttgataatggcttccagactctttgcgttggagacgcctgttaggatcttcaagtcccatcatagaaaattgaaacacagagttgttctgctgatagttttggggatacgtccatctttttaagggattgctttcatctaattctggcaggacctcaccaaaagatccagcctcatacctacatcagacaaaatatcgccgttgttccttctgtactaaagtattgtgttttgctttggaaacacccactcactttgcaatagccgtgcaagatgaatgcagattacactgatcttatgtgttacaaaattggagaaagtatttaataaaacctgttaatttttatactgacaataaaaatgtttctacagatattaatgttaacaagacaaaataaatgtcacgcaactt

SEQ ID NO: 10495 - DNA, 3216 bp, Homo sapiens
  III.4123 (NM_022973)
gagcgggcgagggagcgcgcgcggccgccacaaagctcgggcgccgcggggctgcatgcggcgtacctggcccggcgcggcgactgctctccgggctggcgggggccggccgcgagccccgggggccccgaggccgcagcttgcctgcgcgctctgagccttcgcaactcgcgagcaaagtttggtggaggcaacgccaagcctgagtcctttcttcctctcgttccccaaatccgagggcagcccgcgggcgtcatgcccgcgctcctccgcagcctggggtacgcgctgaagcccgggaggcttggcgccggcgaagacccaaggaccactcttctgcgtttggagttgctccccacaaccccgggctcgtcgctttctccatcccgacccagccggggcgcggggacaacacaggtcgcggaggagcgttgccattcaagtgactgcagcagcagcggcagcgcctcggttcctgagcccaccgcaggctgaaggcattgcgcgtagtccatgcccgtagaggaagtgtgcagatgggattaacgtccacatggagatatggaagaggaccggggattggtaccgtaaccatggtcagctggggtcgtttcatctgcctggtcgtggtcaccatggcaaccttgtccctggcccggccctccttcagtttagttgaggataccacattagagccagaagagccaccaaccaaataccaaatctctcaaccagaagtgtacgtggctgcgccaggggagtcgctagaggtgcgctgcctgttgaaagatgccgccgtgatcagttggactaaggatggggtgcacttggggcccaacaataggacagtgcttattggggagtacttgcagataaagggcgccacgcctagagactccggcctctatgcttgtactgccagtaggactgtagacagtgaaacttggtacttcatggtgaatgtcacagatgccatctcatccggagatgatgaggatgacaccgatggtgcggaagattttgtcagtgagaacagtaacaacaagagagcaccatactggaccaacacagaaaagatggaaaagcggctccatgctgtgcctgcggccaacactgtcaagtttcgctgcccagccggggggaacccaatgccaaccatgcggtggctgaaaaacgggaaggagtttaagcaggagcatcgcattggaggctacaaggtacgaaaccagcactggagcctcattatggaaagtgtggtcccatctgacaagggaaattatacctgtgtggtggagaatgaatacgggtccatcaatcacacgtaccacctggatgttgtggagcgatcgcctcaccggcccatcctccaagccggactgccggcaaatgcctccacagtggtcggaggagacgtagagtttgtctgcaaggtttacagtgatgcccagccccacatccagtggatcaagcacgtggaaaagaacggcagtaaatacgggcccgacgggctgccctacctcaaggttctcaaggccgccggtgttaacaccacggacaaagagattgaggttctctatattcggaatgtaacttttgaggacgctggggaatatacgtgcttggcgggtaattctattgggatatcctttcactctgcatggttgacagttctgccagcgcctggaagagaaaaggagattacagcttccccagactacctggagatagccatttactgcataggggtcttcttaatcgcctgtatggtggtaacagtcatcctgtgccgaatgaagaacacgaccaagaagccagacttcagcagccagccggctgtgcacaagctgaccaaacgtatccccctgcggagacaggtaacagtttcggctgagtccagctcctccatgaactccaacaccccgctggtgaggataacaacacgcctctcttcaacggcagacacccccatgctggcaggggtctccgagtatgaacttccagaggacccaaaatgggagtttccaagagataagctgacactgggcaagcccctgggagaaggttgctttgggcaagtggtcatggcggaagcagtgggaattgacaaagacaagcccaaggaggcggtcaccgtggccgtgaagatgttgaaagatgatgccacagagaaagacctttctgatctggtgtcagagatggagatgatgaagatgattgggaaacacaagaatatcataaatcttcttggagcctgcacacaggatgggcctctctatgtcatagttgagtatgcctctaaaggcaacctccgagaatacctccgagcccggaggccacccgggatggagtactcctatgacattaaccgtgttcctgaggagcagatgaccttcaaggacttggtgtcatgcacctaccagctggccagaggcatggagtacttggcttcccaaaaatgtattcatcgagatttagcagccagaaatgttttggtaacagaaaacaatgtgatgaaaatagcagactttggactcgccagagatatcaacaatatagactattacaaaaagaccaccaatgggcggcttccagtcaagtggatggctccagaagccctgtttgatagagtatacactcatcagagtgatgtctggtccttcggggtgttaatgtgggagatcttcactttagggggctcgccctacccagggattcccgtggaggaactttttaagctgctgaaggaaggacacagaatggataagccagccaactgcaccaacgaactgtacatgatgatgagggactgttggcatgcagtgccctcccagagaccaacgttcaagcagttggtagaagacttggatcgaattctcactctcacaaccaatgagatctgaaagtttatggcttcattgagaaactgggaaaagttggtcaggcgcagtggctcatgcctgtaatcccagcactttgggaggccgaggcaggcggatcatgaggtcaggagttccagaccagcctggccaacatggtgaaaccctgtctctactaaagatacaaaaaattagccgggcgtgttggtgtgcgcctgtaatcccagctactccgggaggctgaggcaggagagtcacttgaaccggggaggcggaggttacagtgagccgagatcatgccattgcattccagccttggcgacagagcgagactccatct

SEQ ID NO: 10496 - DNA, 3219 bp, Homo sapiens
  III.4124 (NM_022974)
gagcgggcgagggagcgcgcgcggccgccacaaagctcgggcgccgcggggctgcatgcggcgtacctggcccggcgcggcgactgctctccgggctggcgggggccggccgcgagccccgggggccccgaggccgcagcttgcctgcgcgctctgagccttcgcaactcgcgagcaaagtttggtggaggcaacgccaagcctgagtcctttcttcctctcgttccccaaatccgagggcagcccgcgggcgtcatgcccgcgctcctccgcagcctggggtacgcgctgaagcccgggaggcttggcgccggcgaagacccaaggaccactcttctgcgtttggagttgctccccacaaccccgggctcgtcgctttctccatcccgacccagccggggcgcggggacaacacaggtcgcggaggagcgttgccattcaagtgactgcagcagcagcggcagcgcctcggttcctgagcccaccgcaggctgaaggcattgcgcgtagtccatgcccgtagaggaagtgtgcagatgggattaacgtccacatggagatatggaagaggaccggggattggtaccgtaaccatggtcagctggggtcgtttcatctgcctggtcgtggtcaccatggcaaccttgtccctggcccggccctccttcagtttagttgaggataccacattagagccagaagagccaccaaccaaataccaaatctctcaaccagaagtgtacgtggctgcgccaggggagtcgctagaggtgcgctgcctgttgaaagatgccgccgtgatcagttggactaaggatggggtgcacttggggcccaacaataggacagtgcttattggggagtacttgcagataaagggcgccacgcctagagactccggcctctatgcttgtactgccagtaggactgtagacagtgaaacttggtacttcatggtgaatgtcacagatgccatctcatccggagatgatgaggatgacaccgatggtgcggaagattttgtcagtgagaacagtaacaacaagagagcaccatactggaccaacacagaaaagatggaaaagcggctccatgctgtgcctgcggccaacactgtcaagtttcgctgcccagccggggggaacccaatgccaaccatgcggtggctgaaaaacgggaaggagtttaagcaggagcatcgcattggaggctacaaggtacgaaaccagcactggagcctcattatggaaagtgtggtcccatctgacaagggaaattatacctgtgtggtggagaatgaatacgggtccatcaatcacacgtaccacctggatgttgtggagcgatcgcctcaccggcccatcctccaagccggactgccggcaaatgcctccacagtggtcggaggagacgtagagtttgtctgcaaggtttacagtgatgcccagccccacatccagtggatcaagcacgtggaaaagaacggcagtaaatacgggcccgacgggctgccctacctcaaggttctcaagcactcggggataaatagttccaatgcagaagtgctggctctgttcaatgtgaccgaggcggatgcgggggaatatatatgtaaggtctccaattatatagggcaggccaaccagtctgcctggctcactgtcctgccaaaacagcaagcgcctggaagagaaaaggagattacagcttccccagactacctggagatagccatttactgcataggggtcttcttaatcgcctgtatggtggtaacagtcatcctgtgccgaatgaagaacacgaccaagaagccagacttcagcagccagccggctgtgcacaagctgaccaaacgtatccccctgcggagacaggtaacagtttcggctgagtccagctcctccatgaactccaacaccccgctggtgaggataacaacacgcctctcttcaacggcagacacccccatgctggcaggggtctccgagtatgaacttccagaggacccaaaatgggagtttccaagagataagctgacactgggcaagcccctgggagaaggttgctttgggcaagtggtcatggcggaagcagtgggaattgacaaagacaagcccaaggaggcggtcaccgtggccgtgaagatgttgaaagatgatgccacagagaaagacctttctgatctggtgtcagagatggagatgatgaagatgattgggaaacacaagaatatcataaatcttcttggagcctgcacacaggatgggcctctctatgtcatagttgagtatgcctctaaaggcaacctccgagaatacctccgagcccggaggccacccgggatggagtactcctatgacattaaccgtgttcctgaggagcagatgaccttcaaggacttggtgtcatgcacctaccagctggccagaggcatggagtacttggcttcccaaaaatgtattcatcgagatttagcagccagaaatgttttggtaacagaaaacaatgtgatgaaaatagcagactttggactcgccagagatatcaacaatatagactattacaaaaagaccaccaatgggcggcttccagtcaagtggatggctccagaagccctgtttgatagagtatacactcatcagagtgatgtctggtccttcggggtgttaatgtgggagatcttcactttagggggctcgccctacccagggattcccgtggaggaactttttaagctgctgaaggaaggacacagaatggataagccagccaactgcaccaacgaactgtacatgatgatgagggactgttggcatgcagtgccctcccagagaccaacgttcaagcagttggtagaagacttggatcgaattctcactctcacaaccaatgagatctgaaagtttatggcttcattgagaaactgggaaaagttggtcaggcgcagtggctcatgcctgtaatcccagcactttgggaggccgaggcaggcggatcatgaggtcaggagttccagaccagcctggccaacatggtgaaaccctgtctctactaaagatacaaaaaattagccgggcgtgttggtgtgcgcctgtaatcccagctactccgggaggctgaggcaggagagtcacttgaaccggggaggcggaggttacagtgagccgagatcatgccattgcattccagccttggcgacagagcgagactccatct

SEQ ID NO: 10497 - DNA, 4319 bp, Homo sapiens
  III.4125 (NM_022975)
gagcgggcgagggagcgcgcgcggccgccacaaagctcgggcgccgcggggctgcatgcggcgtacctggcccggcgcggcgactgctctccgggctggcgggggccggccgcgagccccgggggccccgaggccgcagcttgcctgcgcgctctgagccttcgcaactcgcgagcaaagtttggtggaggcaacgccaagcctgagtcctttcttcctctcgttccccaaatccgagggcagcccgcgggcgtcatgcccgcgctcctccgcagcctggggtacgcgtgaagcccgggaggcttggcgccggcgaagacccaaggaccactcttctgcgtttggagttgctccccacaaccccgggctcgtcgctttctccatcccgacccacgcggggcgcggggacaacacaggtcgcggaggagcgttgccattcaagtgactgcagcagcagcggcagcgcctcggttcctgagcccaccgcaggctgaaggcattgcgcgtagtccatgcccgtagaggaagtgtgcagatgggattaacgtccacatggagatatggaagaggaccggggattggtaccgtaaccatggtcagctggggtcgtttcatctgcctggtcgtggtcaccatggcaaccttgtccctggcccggccctccttcagtttagttgaggataccacattagagccagaagatgccatctcatccggagatgatgaggatgacaccgatggtgcggaagattttgtcagtgagaacagtaacaacaagagagcaccatactggaccaacacagaaaagatggaaaagcggctccatgctgtgcctgcggccaacactgtcaagtttcgctgcccagccggggggaacccaatgccaaccatgcggtggctgaaaaacgggaaggagtttaagcaggagcatcgcattggaggctacaaggtacgaaaccagcactggagcctcattatggaaagtgtggtcccatctgacaagggaaattatacctgtgtggtggagaatgaatacgggtccatcaatcacacgtaccacctggatgttgtggagcgatcgcctcaccggcccatcctccaagccggactgccggcaaatgcctccacagtggtcggaggagacgtagagtttgtctgcaaggtttacagtgatgcccagccccacatccagtggatcaagcacgtggaaaagaacggcagtaaatacgggcccgacgggctgccctacctcaaggttctcaagcactcggggataaatagttccaatgcagaagtgctggctctgttcaatgtgaccgaggcggatgctggggaatatatatgtaaggtctccaattatatagggcaggccaaccagtctgcctggctcactgtcctgccaaaacagcaagcgcctggaagagaaaaggagattacagcttccccagactacctggagatagccatttactgcataggggtcttcttaatcgcctgtatggtggtaacagtcatcctgtgccgaatgaagaacacgaccaagaagccagacttcagcagccagccggctgtgcacaagctgaccaaacgtatccccctgcggagacaggtttcggctgagtccagctcctccatgaactccaacaccccgctggtgaggataacaacacgcctctcttcaacggcagacacccccatgctggcaggggtctccgagtatgaacttccagaggacccaaaatgggagtttccaagagataagctgacactgggcaagcccctgggagaaggttgctttgggcaagtggtcatggcggaagcagtgggaattgacaaagacaagcccaaggaggcggtcaccgtggccgtgaagatgttgaaagatgatgccacagagaaagacctttctgatctggtgtcagagatggagatgatgaagatgattgggaaacacaagaatatcataaatcttcttggagcctgcacacaggatgggcctctctatgtcatagttgagtatgcctctaaaggcaacctccgagaatacctccgagcccggaggccacccgggatggagtactcctatgacattaaccgtgttcctgaggagcagatgaccttcaaggacttggtgtcatgcacctaccagctggccagaggcatggagtacttggcttcccaaaaatgtattcatcgagatttagcagccagaaatgttttggtaacagaaaacaatgtgatgaaaatagcagactttggactcgccagagatatcaacaatatagactattacaaaaagaccaccaatgggcggcttccagtcaagtggatggctccagaagccctgtttgatagagtatacactcatcagagtgatgtctggtccttcggggtgttaatgtgggagatcttcactttagggggctcgccctacccagggattcccgtggaggaactttttaagctgctgaaggaaggacacagaatggataagccagccaactgcaccaacgaactgtacatgatgatgagggactgttggcatgcagtgccctcccagagaccaacgttcaagcagttggtagaagacttggatcgaattctcactctcacaaccaatgaggaatacttggacctcagccaacctctcgaacagtattcacctagttaccctgacacaagaagttcttgttcttcaggagatgattctgttttttctccagaccccatgccttacgaaccatgccttcctcagtatccacacataaacggcagtgttaaaacatgaatgactgtgtctgcctgtccccaaacaggacagcactgggaacctagctacactgagcagggagaccatgcctcccagagcttgttgtctccacttgtatatatggatcagaggagtaaataattggaaaagtaatcagcatatgtgtaaagatttatacagttgaaaacttgtaatcttccccaggaggagaagaaggtttctggagcagtggactgccacaagccaccatgtaacccctctcacctgccgtgcgtactggctgtggaccagtaggactcaaggtggacgtgcgttctgccttccttgttaattttgtaataattggagaagatttatgtcagcacacacttacagagcacaaatgcagtatataggtgctggatgtatgtaaatatattcaaattatgtataaatatatattatatatttacaaggagttattttttgtattgattttaaatggatgtcccaatgcacctagaaaattggtctctctttttttaatagctatttgctaaatgctgttcttacacataatttcttaattttcaccgagcagaggtggaaaaatacttttgctttcagggaaaatggtataacgttaatttattaataaattggtaatatacaaaacaattaatcatttatagttttttttgtaatttaagtggcatttctatgcaggcagcacagcagactagttaatctattgcttggacttaactagttatcagatcctttgaaaagagaatatttacaatatatgactaatttggggaaaatgaagttttgatttatttgtgtttaaatgctgctgtcagacgattgttcttagacctcctaaatgccccatattaaaagaactcattcataggaaggtgtttcattttggtgtgcaaccctgtcattacgtcaacgcaacgtctaactggacttcccaagataaatggtaccagcgtcctcttaaaagatgccttaatccattccttgaggacagaccttagttgaaatgatagcagaatgtgcttctctctggcagctggccttctgcttctgagttgcacattaatcagattagcctgtattctcttcagtgaattttgataatggcttccagactctttggcgttggagacgcctgttaggatcttcaagtcccatcatagaaaattgaaacacagagttgttctgctgatagttttggggatacgtccatctttttaagggattgctttcatctaattctggcaggacctcaccaaaagatccagcctcatacctacatcagacaaaatatcgccgttgttccttctgtactaaagtattgtgttttgctttggaaacacccactcactttgcaatagccgtgcaagatgaatgcagattacactgatcttatgtgttacaaaattggagaaagtatttaataaaacctgttaatttttatactgacaataaaaatgtttctacagatattaatgttaacaagacaaaataaatgtcacgcaacttaaaaaaaaaaaaaaaa

SEQ ID NO: 10498 - DNA, 1807 bp, Homo sapiens
  III.4126 (NM_022976)
gagcgggcgagggagcgcgcgcggccgccacaaagctcgggcgccgcggggctgcatgcggcgtacctggcccggcgcggcgactgctctccgggctggcgggggccggccgcgagccccgggggccccgaggccgcagcttgcctgcgcgctctgagccttcgcaactcgcgagcaaagtttggtggaggcaacgccaagcctgagtcctttcttcctctcgttccccaaatccgagggcagcccgcgggcgtcatgcccgcgctcctccgcagcctggggtacgcgctgaagcccgggaggcttggcgccggcgaagacccaaggaccactcttctgcgtttggagttgctccccgcaaccccgggctcgtcgctttctccatcccgacccacgcggggccggggacaacacaggtcgcggaggagcgttgccattcaagtgactgcagcagcagcgcagcgcctcggttcctgagcccaccgcagctgaaggcattgcgcgtagtccatgcccgtagaggaagtgtgcagatgggattaacgtccacatggagatatggaagaggaccggggattggtaccgtaaccatggtcagctggggtcgtttcatctgcctggtcgtggtcaccatggcaaccttgtccctggcccggccctccttcagtttagttgaggataccacattagagccagaagagccaccaaccaaataccaaatctctcaaccagaagtgtacgtggctgcgccaggggagtcgctagaggtgcgctgcctgttgaaagatgccgccgtgatcagttggactaaggatggggtgcacttggggcccaacaataggacagtgcttattggggagtacttgcagataaagggcgccacacctagagactccggcctctatgcttgtactgccagtaggactgtagacagtgaaacttggtacttcatggtgaatgtcacagatgccatctcatccggagatgatgaggatgacaccgatggtgcggaagattttgtcagtgagaacagtaacaacaagagagcaccatactggaccaacacagaaaagatggaaaagcggctccatgctgtgcctgcggccaacactgtcaagtttcgctgcccagccggggggaacccaatgccaaccatgcggtggctgaaaaacgggaaggagtttaagcaggagcatcgcattggaggctacaaggtacgaaaccagcactggagcctcattatggaaagtgtggtcccatctgacaagggaaattatacctgtgtagtggagaatgaatacgggtccatcaatcacacgtaccacctggatgttgtggagcgatcgcctcaccggcccatcctccaagccggactgccggcaaatgcctccacagtggtcggaggagacgtagagtttgtctgcaaggtttacagtgatgcccagccccacatccagtggatcaagcacgtggaaaagaacggcagtaaatacgggcccgacgggctgccctacctcaaggttctcaagcactcggggataaatagttccaatgcagaagtgctggctctgttcaatgtgaccgaggcggatgctggggaatatatatgtaaggtctccaattatatagggcaggccaaccagtctgcctggctcactgtcctgccaaaacagcaaggccgccggtgttaacaccacggacaaagagattgaggttctctatattcggaatgtaacttttgaggacgctggggaatatacgtgcttggcgggtaattctattgggatatcctttcactctgcatggt

SEQ ID NO: 10499 - DNA, 4667 bp, Homo sapiens
  III.4127 (NM_023028)
gagcgggcgagggagcgcgcgcggccgccacaaagctcgggcgccgcggggctgcatgcggcgtacctggcccggcgcggcgactgctctccgggctggcgggggccggccgcgagccccgggggccccgaggccgcagcttgcctgcgcgctctgagccttcgcaactcgcgagcaaagtttggtggaggcaacgccaagcctgagtcctttcttcctctcgttccccaaatccgagggcagcccgcgggcgtcatgcccgcgctcctccgcagcctggggtacgcgctgaagcccgggaggcttggcgccggcgaagacccaaggaccactcttctgcgtttggagttgctccccacaaccccgggctcgtcgctttctccatcccgacccagccggggcgcggggacaacacaggtcgcggaggagcgttgccattcaagtgactgcagcagcagcggcagcgcctcggttcctgagcccaccgcaggctgaaggcattgcgcgtagtccatgcccgtagaggaagtgtgcagatgggattaacgtccacatggagatatggaagaggaccggggattggtaccgtaaccatggtcagctggggtcgtttcatctgcctggtcgtggtcaccatggcaaccttgtccctggcccggccctccttcagtttagttgaggataccacattagagccagaagagccaccaaccaaataccaaatctctcaaccagaagtgtacgtggctgcgccaggggagtcgctagaggtgcgctgcctgttgaaagatgccgccgtgatcagttggactaaggatggggtgcacttggggcccaacaataggacagtgcttattggggagtacttgcagataaagggcgccacgcctagagactccggcctctatgcttgtactgccagtaggactgtagacagtgaaacttggtacttcatggtgaatgtcacagatgccatctcatccggagatgatgaggatgacaccgatggtgcggaagattttgtcagtgagaacagtaacaacaagagagcaccatactggaccaacacagaaaagatggaaaagcggctccatgctgtgcctgcggccaacactgtcaagtttcgctgcccagccggggggaacccaatgccaaccatgcggtggctgaaaaacgggaaggagtttaagcaggagcatcgcattggaggctacaaggtacgaaaccagcactggagcctcattatggaaagtgtggtcccatctgacaagggaaattatacctgtgtggtggagaatgaatacgggtccatcaatcacacgtaccacctggatgttgtggagcgatcgcctcaccggcccatcctccaagccggactgccggcaaatgcctccacagtggtcggaggagacgtagagtttgtctgcaaggtttacagtgatgcccagccccacatccagtggatcaagcacgtggaaaagaacggcagtaaatacgggcccgacgggctgccctacctcaaggttctcaaggttctcaaggccgccggtgttaacaccacggacaaagagattgaggttctctatattcggaatgtaacttttgaggacgctggggaatatacgtgcttggcgggtaattctattgggatatcctttcactctgcatggttgacagttctgccagcgcctggaagagaaaaggagattacagcttccccagactacctggagatagccatttactgcataggggtcttcttaatcgcctgtatggtggtaacagtcatcctgtgccgaatgaagaacacgaccaagaagccagacttcagcagccagccggctgtgcacaagctgaccaaacgtatccccctgcggagacaggtttcggctgagtccagctcctccatgaactccaacaccccgctggtgaggataacaacacgcctctcttcaacggcagacacccccatgctggcaggggtctccgagtatgaacttccagaggacccaaaatgggagtttccaagagataagctgacactgggcaagcccctgggagaaggttgctttgggcaagtggtcatggcggaagcagtgggaattgacaaagacaagcccaaggaggcggtcaccgtggccgtgaagatgttgaaagatgatgccacagagaaagacctttctgatctggtgtcagagatggagatgatgaagatgattgggaaacacaagaatatcataaatcttcttggagcctgcacacaggatgggcctctctatgtcatagttgagtatgcctctaaaggcaacctccgagaatacctccgagcccggaggccacccgggatggagtactcctatgacattaaccgtgttcctgaggagcagatgaccttcaaggacttggtgtcatgcacctaccagctggccagaggcatggagtacttggcttcccaaaaatgtattcatcgagatttagcagccagaaatgttttggtaacagaaaacaatgtgatgaaaatagcagactttggactcgccagagatatcaacaatatagactattacaaaaagaccaccaatgggcggcttccagtcaagtggatggctccagaagccctgtttgatagagtatacactcatcagagtgatgtctggtccttcggggtgttaatgtgggagatcttcactttagggggctcgccctacccagggattcccgtggaggaactttttaagctgctgaaggaaggacacagaatggataagccagccaactgcaccaacgaactgtacatgatgatgagggactgttggcatgcagtgccctcccagagaccaacgttcaagcagttggtagaagacttggatcgaattctcactctcacaaccaatgaggaatacttggacctcagtcagcctctcgaaccgtattcaccttgttatcctgacccaagatgaaataaaacgtctctcttcccttctttcaggaatacttggacctcagccaacctctcgaacagtattcacctagttaccctgacacaagaagttcttgttcttcaggagatgattctgttttttctccagaccccatgccttacgaaccatgccttcctcagtatccacacataaacggcagtgttaaaacatgaatgactgtgtctgcctgtccccaaacaggacagcactgggaacctagctacactgagcagggagaccatgcctcccagagcttgttgtctccacttgtatatatggatcagaggagtaaataattggaaaagtaatcagcatatgtgtaaagatttatacagttgaaaacttgtaatcttccccaggaggagaagaaggtttctggagcagtggactgccacaagccaccatgtaacccctctcacctgccgtgcgttctggctgtggaccagtaggactcaaggtggacgtgcgttctgccttccttgttaattttgtaataattggagaagatttatgtcagcacacacttacagagcacaaatgcagtatataggtgctggatgtatgtaaatatattcaaattatgtataaatatatattatatatttacaaggagttattttttgtattgattttaaatggatgtcccaatgcacctagaaaattggtctctctttttttaatagctatttgctaaatgctgttcttacacataatttcttaattttcaccgagcagaggtggaaaaatacttttgctttcagggaaaatggtataacgttaatttattaataaattggtaatatacaaaacaattaatcatttatagttttttttgtaatttaagtggcatttctatgcaggcagcacagcagactagttaatctattgcttggacttaactagttatcagatcctttgaaaagagaatatttacaatatatgactaatttggggaaaatgaagttttgatttatttgtgtttaaatgctgctgtcagacgattgttcttagacctcctaaatgccccatattaaaagaactcattcataggaaggtgtttcattttggtgtgcaaccctgtcattacgtcaacgcaacgtctaactggacttcccaagataaatggtaccagcgtcctcttaaaagatgccttaatccattccttgaggacagaccttagttgaaatgatagcagaatgtgcttctctctggcagctggccttctgcttctgagttgcacattaatcagattagcctgattctcttcagtgaattttgataatggcttccagactctttgcgttggagacgcctgttaggatcttcaagtcccatcatagaaaattgaaacacagagttgttctgctgatagttttggggatacgtccatctttttaagggattgctttcatctaattctggcaggacctcaccaaaagatccagcctcatacctacatcagacaaaatatcgccgttgttccttctgtactaaagtattgtgttttgctttggaaacacccactcactttgcaatagccgtgcaagatgaatgcagattacactgatcttatgtgttacaaaattggagaaagtatttaataaaacctgttaatttttatactgacaataaaaatgtttctacagatattaatgttaacaagacaaaataaatgtcacgcaactt

SEQ ID NO: 10500 - DNA, 4305 bp, Homo sapiens
  III.4128 (NM_023029)
gagcgggcgagggagcgcgcgcggccgccacaaagctcgggcgccgcggggctgcatgcggcgtacctggcccggcgcggcgactgctctccgggctggcgggggccggccgcgagccccgggggccccgaggccgcagcttgcctgcgcgctctgagccttcgcaactcgcgagcaaagtttggtggaggcaacgccaagcctgagtcctttcttcctctcgttccccaaatccgagggcagcccgcgggcgtcatgcccgcgctcctccgcagcctggggtacgcgctgaagcccgggaggcttggcgccggcgaagacccaaggaccactcttctgcgtttggagttgctccccacaaccccgggctcgtcgctttctccatcccgacccacgcggggcgcggggacaacacaggtcgcggaggagcgttgccattcaagtgactgcagcagcagcggcagcgcctcggttcctgagcccaccgcaggctgaaggcattgcgcgtagtccatgcccgtagaggaagtgtgcagatgggattaacgtccacatggagatatggaagaggaccggggattggtaccgtaaccatggtcagctggggtcgtttcatctgcctggtcgtggtcaccatggcaaccttgtccctggcccggccctccttcagtttagttgaggataccacattagagccagaagatgccatctcatccggagatgatgaggatgacaccgatggtgcggaagattttgtcagtgagaacagtaacaacaagagagcaccatactggaccaacacagaaaagatggaaaagcggctccatgctgtgcctgcggccaacactgtcaagtttcgctgcccagccggggggaacccaatgccaaccatgcggtggctgaaaaacgggaaggagtttaagcaggagcatcgcattggaggctacaaggtacgaaaccagcactggagcctcattatggaaagtgtggtcccatctgacaagggaaattatacctgtgtggtggagaatgaatacgggtccatcaatcacacgtaccacctggatgttgtggagcgatcgcctcaccggcccatcctccaagccggactgccggcaaatgcctccacagtggtcggaggagacgtagagtttgtctgcaaggtttacagtgatgcccagccccacatccagtggatcaagcacgtggaaaagaacggcagtaaatacgggcccgacgggctgccctacctcaaggttctcaaggccgccggtgttaacaccacggacaaagagattgaggttctctatattcggaatgtaacttttgaggacgctggggaatatacgtgcttggcgggtaattctattgggatatcctttcactctgcatggttgacagttctgccagcgcctggaagagaaaaggagattacagcttccccagactacctggagatagccatttactgcataggggtcttcttaatcgcctgtatggtggtaacagtcatcctgtgccgaatgaagaacacgaccaagaagccagacttcagcagccagccggctgtgcacaagctgaccaaacgtatccccctgcggagacaggtaacagtttcggctgagtccagctcctccatgaactccaacaccccgctggtgaggataacaacacgcctctcttcaacggcagacacccccatgctggcaggggtctccgagtatgaacttccagaggacccaaaatgggagtttccaagagataagctgacactgggcaagcccctgggagaaggttgctttgggcaagtggtcatggcggaagcagtgggaattgacaaagacaagcccaaggaggcggtcaccgtggccgtgaagatgttgaaagatgatgccacagagaaagacctttctgatctggtgtcagagatggagatgatgaagatgattgggaaacacaagaatatcataaatcttcttggagcctgcacacaggatgggcctctctatgtcatagttgagtatgcctctaaaggcaacctccgagaatacctccgagcccggaggccacccgggatggagtactcctatgacattaaccgtgttcctgaggagcagatgaccttcaaggacttggtgtcatgcacctaccagctggccagaggcatggagtacttggcttcccaaaaatgtattcatcgagatttagcagccagaaatgttttggtaacagaaaacaatgtgatgaaaatagcagactttggactcgccagagatatcaacaatatagactattacaaaaagaccaccaatgggcggcttccagtcaagtggatggctccagaagccctgtttgatagagtatacactcatcagagtgatgtctggtccttcggggtgttaatgtgggagatcttcactttagggggctcgccctacccagggattcccgtggaggaactttttaagctgctgaaggaaggacacagaatggataagccagccaactgcaccaacgaactgtacatgatgatgagggactgttggcatgcagtgccctcccagagaccaacgttcaagcagttggtagaagacttggatcgaattctcactctcacaaccaatgaggaatacttggacctcagccaacctctcgaacagtattcacctagttaccctgacacaagaagttcttgttcttcaggagatgattctgttttttctccagaccccatgccttacgaaccatgccttcctcagtatccacacataaacggcagtgttaaaacatgaatgactgtgtctgcctgtccccaaacaggacagcactgggaacctagctacactgagcagggagaccatgcctcccagagcttgttgtctccacttgtatatatggatcagaggagtaaataattggaaaagtaatcagcatatgtgtaaagatttatacagttgaaaacttgtaatcttccccaggaggagaagaaggtttctggagcagtggactgccacaagccaccatgtaacccctctcacctgccgtgcgttctggctgtggaccagtaggactcaaggtggacgtgcgttctgccttccttgttaattttgtaataattggagaagatttatgtcagcacacacttacagagcacaaatgcagtatataggtgctggatgtatgtaaatatattcaaattatgtataaatatatattatatatttacaaggagttattttttgtattgattttaaatggatgtcccaatgcacctagaaaattggtctctctttttttaatagctatttgctaaatgctgttcttacacataatttcttaattttcaccgagcagaggtggaaaaatacttttgctttcagggaaaatggtataacgttaatttattaataaattggtaatatacaaaacaattaatcatttatagttttttttgtaatttaagtggcatttctatgcaggcagcacagcagactagttaatctattgcttggacttaactagttatcagatcctttgaaaagagaatatttacaatatatgactaatttggggaaaatgaagttttgatttatttgtgtttaaatgctgctgtcagacgattgttcttagacctcctaaatgccccatattaaaagaactcattcataggaaggtgtttcattttggtgtgcaaccctgtcattacgtcaacgcaacgtctaactggacttcccaagataaatggtaccagcgtcctcttaaaagatgccttaatccattccttgaggacagaccttagttgaaatgatagcagaatgtgcttctctctggcagctggccttctgcttctgagttgcacattaatcagattagcctgattctcttcagtgaattttgataatggcttccagactctttgcgttggagacgcctgttaggatcttcaagtcccatcatagaaaattgaaacacagagttgttctgctgatagttttggggatacgtccatctttttaagggattgctttcatctaattctggcaggacctcaccaaaagatccagcctcatacctacatcagacaaaatatcgccgttgttccttctgtactaaagtattgtgttttgctttggaaacacccactcactttgcaatagccgtgcaagatgaatgcagattacactgatcttatgtgttacaaaattggagaaagtatttaataaaacctgttaatttttatactgacaataaaaatgtttctacagatattaatgttaacaagacaaaataaatgtcacgcaactt

SEQ ID NO: 10501 - DNA, 4222 bp, Homo sapiens
  III.4129 (NM_023030)
gagcgggcgagggagcgcgcgcggccgccacaaagctcgggcgccgcggggctgcatgcggcgtacctggcccggcgcggcgactgctctccgggctggcgggggccggccgcgagccccgggggccccgaggccgcagcttgcctgcgcgctctgagccttcgcaactcgcgagcaaagtttggtggaggcaacgcaagcctgagtcctttcttcctctcgttccccaaatccgagggcagcccgcgggcgtcatggcgctcctccgcagcctggggtacgcgtgaagcccgggaggcttggcgccggcgaagacccaaggaccactcttctgcgtttggagttgctccccgcaaccccgggctcgtcgctttctccatcccgacccacgcggggccggggacaacacaggtcgcggaggagcgttgccattcaagtgactgcagcagcagcgcagcgcctcggttcctgagcccaccgcagctgaaggcattgcgcgtagtccatgcccgtagaggaagtgtgcagatgggattaacgtccacatggagatatggaagaggaccggggattggtaccgtaaccatggtcagctggggtcgtttcatctgcctggtcgtggtcaccatggcaaccttgtccctggcccggccctccttcagtttagttgaggataccacattagagccagaaggagcaccatactggaccaacacagaaaagatggaaaagcggctccatgctgtgcctgcggccaacactgtcaagtttcgctgcccagccggggggaacccaatgccaaccatgcggtggctgaaaaacgggaaggagtttaagcaggagcatcgcattggaggctacaaggtacgaaaccagcactggagcctcattatggaaagtgtggtcccatctgacaagggaaattatacctgtgtagtggagaatgaatacgggtccatcaatcacacgtaccacctggatgttgtggagcgatcgcctcaccggcccatcctccaagccggactgccggcaaatgcctccacagtggtcggaggagacgtagagtttgtctgcaaggtttacagtgatgcccagccccacatccagtggatcaagcacgtggaaaagaacggcagtaaatacgggcccgacgggctgccctacctcaaggttctcaagcactcggggataaatagttccaatgcagaagtgctggctctgttcaatgtgaccgaggcggatgctggggaatatatatgtaaggtctccaattatatagggcaggccaaccagtctgcctggctcactgtcctgccaaaacagcaagcgcctggaagagaaaaggagattacagcttccccagactacctggagatagccatttactgcataggggtcttcttaatcgcctgtatggtggtaacagtcatcctgtgccgaatgaagaacacgaccaagaagccagacttcagcagccagccggctgtgcacaagctgaccaaacgtatccccctgcggagacaggtaacagtttcggctgagtccagctcctccatgaactccaacaccccgctggtgaggataacaacacgcctctcttcaacggcagacacccccatgctggcaggggtctccgagtatgaacttccagaggacccaaaatgggagtttccaagagataagctgacactgggcaagcccctgggagaaggttgctttgggcaagtggtcatggcggaagcagtgggaattgacaaagacaagcccaaggaggcggtcaccgtggccgtgaagatgttgaaagatgatgccacagagaaagacctttctgatctggtgtcagagatggagatgatgaagatgattgggaaacacaagaatatcataaatcttcttggagcctgcacacaggatgggcctctctatgtcatagttgagtatgcctctaaaggcaacctccgagaatacctccgagcccggaggccacccgggatggagtactcctatgacattaaccgtgttcctgaggagcagatgaccttcaaggacttggtgtcatgcacctaccagctggccagacggatggagtacttggcttcccaaaaatgtattcatcgagatttagcagccagaaatgttttggtaacagaaaacaatgtgatgaaaatagcagactttggactcgccagagatatcaacaatatagactattacaaaaagaccaccaatgggcggcttccagtcaagtggatggctccagaagccctgtttgatagagtatacactcatcagagtgatgtctggtccttcggggtgttaatgtgggagatcttcactttagggggctcgccctacccagggattcccgtggaggaactttttaagctgctgaaggaaggacacagaatggataagccagccaactgcaccaacgaactgtacatgatgatgagggactgttggcatgcagtgccctcccagagaccaacgttcaagcagttggtagaagacttggatcgaattctcactctcacaaccaatgaggaatacttggacctcagccaacctctcgaacagtattcacctagttaccctgacacaagaagttcttgttcttcaggagatgattctgttttttctccagaccccatgccttacgaaccatgccttcctcagtatccacacataaacggcagtgttaaaacatgaatgactgtgtctgcctgtccccaaacaggacagcactgggaacctagctacactgagcagggagaccatgcctcccagagcttgttgtctccacttgtatatatggatcagaggagtaaataattggaaaagtaatcagcatatgtgtaaagatttatacagttgaaaacttgtaatcttccccaggaggagaagaaggtttctggagcagtggactgccacaagccaccatgtaacccctctcacctgccgtgcgttctggctgtggaccagtaggactcaaggtggacgtgcgttctgccttccttgttaattttgtaataattggagaagatttatgtcagcacacacttacagagcacaaatgcagtatataggtgctggatgtatgtaaatatattcaaattatgtataaatatatattatatatttacaaggagttattttttgtattgattttaaatggatgtcccaatgcacctagaaaattggtctctctttttttaatagctatttgctaaatgctgttcttacacataatttcttaattttcaccgagcagaggtggaaaaatacttttgctttcagggaaaatggtataacgttaatttattaataaattggtaatatacaaaacaattaatcatttatagttttttttgtaatttaagtggcatttctatgcaggcagcacagcagactagttaatctattgcttggacttaactagttatcagatcctttgaaaagagaatatttacaatatatgactaatttggggaaaatgaagttttgatttatttgtgtttaaatgctgctgtcagacgattgttcttagacctcctaaatgccccatattaaaagaactcattcataggaaggtgtttcattttggtgtgcaaccctgtcattacgtcaacgcaacgtctaactggacttcccaagataaatggtaccagcgtcctcttaaaagatgccttaatccattccttgaggacagaccttagttgaaatgatagcagaatgtgcttctctctggcagctggccttctgcttctgagttgcacattaatcagattagcctgattctcttcagtgaattttgataatggcttccagactctttgcgttggagacgcctgttaggatcttcaagtcccatcatagaaaattgaaacacagagttgttctgctgatagttttggggatacgtccatctttttaagggattgctttcatctaattctggcaggacctcaccaaaagatccagcctcatacctacatcagacaaaatatcgccgttgttccttctgtactaaagtattgtgttttgctttggaaacacccactcactttgcaatagccgtgcaagatgaatgcagattacactgatcttatgtgttacaaaattggagaaagtatttaataaaacctgttaatttttatactgacaataaaaatgtttctacagatattaatgttaacaagacaaaataaatgtcacgcaactt

SEQ ID NO: 10502 - DNA, 4216 bp, Homo sapiens
  III.4130 (NM_023031)
gagcgggcgagggagcgcgcgcggccgccacaaagctcgggcgccgcggggctgcatgcggcgtacctggcccggcgcggcgactgctctccgggctggcgggggccggccgcgagccccgggggccccgaggccgcagcttgcctgcgcgctctgagccttcgcaactcgcgagcaaagtttggtggaggcaacgcaagcctgagtcctttcttcctctcgttccccaaatccgagggcagcccgcgggcgtcatggcgctcctccgcagcctggggtacgcgtgaagcccgggaggcttggcgccggcgaagacccaaggaccactcttctgcgtttggagttgctccccgcaaccccgggctcgtcgctttctccatcccgacccacgcggggccggggacaacacaggtcgcggaggagcgttgccattcaagtgactgcagcagcagcgcagcgcctcggttcctgagcccaccgcagctgaaggcattgcgcgtagtccatgcccgtagaggaagtgtgcagatgggattaacgtccacatggagatatggaagaggaccggggattggtaccgtaaccatggtcagctggggtcgtttcatctgcctggtcgtggtcaccatggcaaccttgtccctggcccggccctccttcagtttagttgaggataccacattagagccagaaggagcaccatactggaccaacacagaaaagatggaaaagcggctccatgctgtgcctgcggccaacactgtcaagtttcgctgcccagccggggggaacccaatgccaaccatgcggtggctgaaaaacgggaaggagtttaagcaggagcatcgcattggaggctacaaggtacgaaaccagcactggagcctcattatggaaagtgtggtcccatctgacaagggaaattatacctgtgtagtggagaatgaatacgggtccatcaatcacacgtaccacctggatgttgtggagcgatcgcctcaccggcccatcctccaagccggactgccggcaaatgcctccacagtggtcggaggagacgtagagtttgtctgcaaggtttacagtgatgcccagccccacatccagtggatcaagcacgtggaaaagaacggcagtaaatacgggcccgacgggctgccctacctcaaggttctcaagcactcggggataaatagttccaatgcagaagtgctggctctgttcaatgtgaccgaggcggatgctggggaatatatatgtaaggtctccaattatatagggcaggccaaccagtctgcctggctcactgtcctgccaaaacagcaagcgcctggaagagaaaaggagattacagcttccccagactacctggagatagccatttactgcataggggtcttcttaatcgcctgtatggtggtaacagtcatcctgtgccgaatgaagaacacgaccaagaagccagacttcagcagccagccggctgtgcacaagctgaccaaacgtatccccctgcggagacaggtttcggctgagtccagctcctccatgaactccaacaccccgctggtgaggataacaacacgcctctcttcaacggcagacacccccatgctggcaggggtctccgagtatgaacttccagaggacccaaaatgggagtttccaagagataagctgacactgggcaagcccctgggagaaggttgctttgggcaagtggtcatggcggaagcagtgggaattgacaaagacaagcccaaggaggcggtcaccgtggccgtgaagatgttgaaagatgatgccacagagaaagacctttctgatctggtgtcagagatggagatgatgaagatgattgggaaacacaagaatatcataaatcttcttggagcctgcacacaggatgggcctctctatgtcatagttgagtatgcctctaaaggcaacctccgagaatacctccgagcccggaggccacccgggatggagtactcctatgacattaaccgtgttcctgaggagcagatgaccttcaaggacttggtgtcatgcacctaccagctggccagacggatggagtacttggcttcccaaaaatgtattcatcgagatttagcagccagaaatgttttggtaacagaaaacaatgtgatgaaaatagcagactttggactcgccagagatatcaacaatatagactattacaaaaagaccaccaatgggcggcttccagtcaagtggatggctccagaagccctgtttgatagagtatacactcatcagagtgatgtctggtccttcggggtgttaatgtgggagatcttcactttagggggctcgccctacccagggattcccgtggaggaactttttaagctgctgaaggaaggacacagaatggataagccagccaactgcaccaacgaactgtacatgatgatgagggactgttggcatgcagtgccctcccagagaccaacgttcaagcagttggtagaagacttggatcgaattctcactctcacaaccaatgaggaatacttggacctcagccaacctctcgaacagtattcacctagttaccctgacacaagaagttcttgttcttcaggagatgattctgttttttctccagaccccatgccttacgaaccatgccttcctcagtatccacacataaacggcagtgttaaaacatgaatgactgtgtctgcctgtccccaaacaggacagcactgggaacctagctacactgagcagggagaccatgcctcccagagcttgttgtctccacttgtatatatggatcagaggagtaaataattggaaaagtaatcagcatatgtgtaaagatttatacagttgaaaacttgtaatcttccccaggaggagaagaaggtttctggagcagtggactgccacaagccaccatgtaacccctctcacctgccgtgcgttctggctgtggaccagtaggactcaaggtggacgtgcgttctgccttccttgttaattttgtaataattggagaagatttatgtcagcacacacttacagagcacaaatgcagtatataggtgctggatgtatgtaaatatattcaaattatgtataaatatatattatatatttacaaggagttattttttgtattgattttaaatggatgtcccaatgcacctagaaaattggtctctctttttttaatagctatttgctaaatgctgttcttacacataatttcttaattttcaccgagcagaggtggaaaaatacttttgctttcagggaaaatggtataacgttaatttattaataaattggtaatatacaaaacaattaatcatttatagttttttttgtaatttaagtggcatttctatgcaggcagcacagcagactagttaatctattgcttggacttaactagttatcagatcctttgaaaagagaatatttacaatatatgactaatttggggaaaatgaagttttgatttatttgtgtttaaatgctgctgtcagacgattgttcttagacctcctaaatgccccatattaaaagaactcattcataggaaggtgtttcattttggtgtgcaaccctgtcattacgtcaacgcaacgtctaactggacttcccaagataaatggtaccagcgtcctcttaaaagatgccttaatccattccttgaggacagaccttagttgaaatgatagcagaatgtgcttctctctggcagctggccttctgcttctgagttgcacattaatcagattagcctgattctcttcagtgaattttgataatggcttccagactctttgcgttggagacgcctgttaggatcttcaagtcccatcatagaaaattgaaacacagagttgttctgctgatagttttggggatacgtccatctttttaagggattgctttcatctaattctggcaggacctcaccaaaagatccagcctcatacctacatcagacaaaatatcgccgttgttccttctgtactaaagtattgtgttttgctttggaaacacccactcactttgcaatagccgtgcaagatgaatgcagattacactgatcttatgtgttacaaaattggagaaagtatttaataaaacctgttaatttttatactgacaataaaaatgtttctacagatattaatgttaacaagacaaaataaatgtcacgcaactt

SEQ ID NO: 10503 - DNA, 4093 bp, Homo sapiens
  III.4131 (NM_000142)
cgcgcgctgcctgaggacgccgcggcccccgcccccgccatgggcgcccctgcctgcgccctcgcgctctgcgtggccgtggccatcgtggccggcgcctcctcggagtccttggggacggagcagcgcgtcgtggggcgagcggcagaagtcccgggcccagagcccggccagcaggagcagttggtcttcggcagcggggatgctgtggagctgagctgtcccccgcccgggggtggtcccatggggcccactgtctgggtcaaggatggcacagggctggtgccctcggagcgtgtcctggtggggccccagcggctgcaggtgctgaatgcctcccacgaggactccggggcctacagctgccggcagcggctcacgcagcgcgtactgtgccacttcagtgtgcgggtgacagacgctccatcctcgggagatgacgaagacggggaggacgaggctgaggacacaggtgtggacacaggggccccttactggacacggcccgagcggatggacaagaagctgctggccgtgccggccgccaacaccgtccgcttccgctgcccagccgctggcaaccccactccctccatctcctggctgaagaacggcagggagttccgcggcgagcaccgcattggaggcatcaagctgcggcatcagcagtggagcctggtcatggaaagcgtggtgccctcggaccgcggcaactacacctgcgtcgtggagaacaagtttggcagcatccggcagacgtacacgctggacgtgctggagcgctccccgcaccggcccatcctgcaggcggggctgccggccaaccagacggcggtgctgggcagcgacgtggagttccactgcaaggtgtacagtgacgcacagccccacatccagtggctcaagcacgtggaggtgaacggcagcaaggtgggcccggacggcacaccctacgttaccgtgctcaagacggcgggcgctaacaccaccgacaaggagctagaggttctctccttgcacaacgtcacctttgaggacgccggggagtacacctgcctggcgggcaattctattgggttttctcatcactctgcgtggctggtggtgctgccagccgaggaggagctggtggaggctgacgaggcgggcagtgtgtatgcaggcatcctcagctacggggtgggcttcttcctgttcatcctggtggtggcggctgtgacgctctgccgcctgcgcagcccccccaagaaaggcctgggctcccccaccgtgcacaagatctcccgcttcccgctcaagcgacaggtgtccctggagtccaacgcgtccatgagctccaacacaccactggtgcgcatcgcaaggctgtcctcaggggagggccccacgctggccaatgtctccgagctcgagctgcctgccgaccccaaatgggagctgtctcgggcccggctgaccctgggcaagccccttggggagggctgcttcggccaggtggtcatggcggaggccatcggcattgacaaggaccgggccgccaagcctgtcaccgtagccgtgaagatgctgaaagacgatgccactgacaaggacctgtcggacctggtgtctgagatggagatgatgaagatgatcgggaaacacaaaaacatcatcaacctgctgggcgcctgcacgcagggcgggcccctgtacgtgctggtggagtacgcggccaagggtaacctgcgggagtttctgcgggcgcggcggcccccgggcctggactactccttcgacacctgcaagccgcccgaggagcagctcaccttcaaggacctggtgtcctgtgcctaccaggtggcccggggcatggagtacttggcctcccagaagtgcatccacagggacctggctgcccgcaatgtgctggtgaccgaggacaacgtgatgaagatcgcagacttcgggctggcccgggacgtgcacaacctcgactactacaagaagacaaccaacggccggctgcccgtgaagtggatggcgcctgaggccttgtttgaccgagtctacactcaccagagtgacgtctggtcctttggggtcctgctctgggagatcttcacgctggggggctccccgtaccccggcatccctgtggaggagctcttcaagctgctgaaggagggccaccgcatggacaagcccgccaactgcacacacgacctgtacatgatcatgcgggagtgctggcatgccgcgccctcccagaggcccaccttcaagcagctggtggaggacctggaccgtgtccttaccgtgacgtccaccgacgagtacctggacctgtcggcgcctttcgagcagtactccccgggtggccaggacacccccagctccagctcctcaggggacgactccgtgtttgcccacgacctgctgcccccggccccacccagcagtgggggctcgcggacgtgaagggccactggtccccaacaatgtgaggggtccctagcagccctccctgctgctggtgcacagccactccccggcatgagactcagtgcagatggagagacagctacacagagctttggtctgtgtgtgtgtgtgtgcgtgtgtgtgtgtgtgtgcacatccgcgtgtgcctgtgtgcgtgcgcatcttgcctccaggtgcagaggtaccctgggtgtccccgctgctgtgcaacggtctcctgactggtgctgcagcaccgaggggcctttgttctggggggacccagtgcagaatgtaagtgggcccacccggtgggaccccgtggggcagggagctgggcccgacatggctcggcctctgcctttgcaccacgggacatcacagggtgcgctcggcccctcccacacccaaagctgagcctgcagggaagccccacatgtccagcaccttgtgcctggggtgttagtggcaccgcctccccacctccaggctttcccacttcccaccctgcccctcagagactgaaattacgggtacctgaagatgggagcctttaccttttatgcaaaaggtttattccggaaactagtgtacatttctataaatagatgctgtgtatatggtatatatacatatatatatataacatatatggaagaggaaaaggctggtacaacggaggcctgcgaccctgggggcacaggaggcaggcatggccctgggcggggcgtgggggggcgtggagggaggccccaggggtctcacccatgcaagcagaggaccagggctttttctggcaccgcagttttgttttaaaactggacctgtatatttgtaaagctatttatgggcccctggcactcttgttcccacaccccaacacttccagcatttagctggccacatggcggagagttttaatttttaacttattgacaaccgagaaggtttatcccgccgatagagggacggccaagaatgtacgtccagcctgccccggagctggaggatcccctccaagcctaaaaggttgttaatagttggaggtgattccagtgaagatattttatttgctttgtcctttttcaggagaattagatttctataggatttttctttaggagatttattttttggacttcaaagcaagctggtattttcatacaaattcttctaattgctgtgtgtcccaggcagggagacggtttccagggaggggccggccctgtgtgcaggttccgatgttattagatgttacaagtttatatatatctatatatataatttattgagtttttacaagatgtatttgttgtagacttaacacttcttacgcaatgcttctagagttttatagcctggactgctacctttcaaagcttggagggaagccgtgaattcagttggttcgttctgtactgttactgggccctgagtctgggcagctgtcccttgcttgcctgcagggccatggctcagggtggtctcttcttggggcccagtgcatggtggccagaggtgtcacccaaaccggcaggtgcgattttgttaacccagcgacgaactttccgaaaaataaagacacctggttgctaacctgaaaaaaaaaaaaaaaaaaaaaaaaaaaaaa

SEQ ID NO: 10504 - DNA, 3757 bp, Homo sapiens
  III.4132 (NM_022965)
cgcgcgctgcctgaggacgccgcggcccccgcccccgccatgggcgcccctgcctgcgccctcgcgctctgcgtggccgtggccatcgtggccggcgcctcctcggagtccttggggacggagcagcgcgtcgtggggcgagcggcagaagtcccgggcccagagcccggccagcaggagcagttggtcttcggcagcggggatgctgtggagctgagctgtcccccgcccgggggtggtcccatggggcccactgtctgggtcaaggatggcacagggctggtgccctcggagcgtgtcctggtggggccccagcggctgcaggtgctgaatgcctcccacgaggactccggggcctacagctgccggcagcggctcacgcagcgcgtactgtgccacttcagtgtgcgggtgacagacgctccatcctcgggagatgacgaagacggggaggacgaggctgaggacacaggtgtggacacaggggccccttactggacacggcccgagcggatggacaagaagctgctggccgtgccggccgccaacaccgtccgcttccgctgcccagccgctggcaaccccactccctccatctcctggctgaagaacggcagggagttccgcggcgagcaccgcattggaggcatcaagctgcggcatcagcagtggagcctggtcatggaaagcgtggtgccctcggaccgcggcaactacacctgcgtcgtggagaacaagtttggcagcatccggcagacgtacacgctggacgtgctggagcgctccccgcaccggcccatcctgcaggcggggctgccggccaaccagacggcggtgctgggcagcgacgtggagttccactgcaaggtgtacagtgacgcacagccccacatccagtggctcaagcacgtggaggtgaacggcagcaaggtgggcccggacggcacaccctacgttaccgtgctcaaggtgtccctggagtccaacgcgtccatgagctccaacacaccactggtgcgcatcgcaaggctgtcctcaggggagggccccacgctggccaatgtctccgagctcgagctgcctgccgaccccaaatgggagctgtctcgggcccggctgaccctgggcaagccccttggggagggctgcttcggccaggtggtcatggcggaggccatcggcattgacaaggaccgggccgccaagcctgtcaccgtagccgtgaagatgctgaaagacgatgccactgacaaggacctgtcggacctggtgtctgagatggagatgatgaagatgatcgggaaacacaaaaacatcatcaacctgctgggcgcctgcacgcagggcgggcccctgtacgtgctggtggagtacgcggccaagggtaacctgcgggagtttctgcgggcgcggcggcccccgggcctggactactccttcgacacctgcaagccgcccgaggagcagctcaccttcaaggacctggtgtcctgtgcctaccaggtggcccggggcatggagtacttggcctcccagaagtgcatccacagggacctggctgcccgcaatgtgctggtgaccgaggacaacgtgatgaagatcgcagacttcgggctggcccgggacgtgcacaacctcgactactacaagaagacaaccaacggccggctgcccgtgaagtggatggcgcctgaggccttgtttgaccgagtctacactcaccagagtgacgtctggtcctttggggtcctgctctgggagatcttcacgctggggggctccccgtaccccggcatccctgtggaggagctcttcaagctgctgaaggagggccaccgcatggacaagcccgccaactgcacacacgacctgtacatgatcatgcgggagtgctggcatgccgcgccctcccagaggcccaccttcaagcagctggtggaggacctggaccgtgtccttaccgtgacgtccaccgacgagtacctggacctgtcggcgcctttcgagcagtactccccgggtggccaggacacccccagctccagctcctcaggggacgactccgtgtttgcccacgacctgctgcccccggccccacccagcagtgggggctcgcggacgtgaagggccactggtccccaacaatgtgaggggtccctagcagccctccctgctgctggtgcacagccactccccggcatgagactcagtgcagatggagagacagctacacagagctttggtctgtgtgtgtgtgtgtgcgtgtgtgtgtgtgtgtgcacatccgcgtgtgcctgtgtgcgtgcgcatcttgcctccaggtgcagaggtaccctgggtgtccccgctgctgtgcaacggtctcctgactggtgctgcagcaccgaggggcctttgttctggggggacccagtgcagaatgtaagtgggcccacccggtgggaccccgtggggcagggagctgggcccgacatggctcggcctctgcctttgcaccacgggacatcacagggtgcgctcggcccctcccacacccaaagctgagcctgcagggaagccccacatgtccagcaccttgtgcctggggtgttagtggcaccgcctccccacctccaggctttcccacttcccaccctgcccctcagagactgaaattacgggtacctgaagatgggagcctttaccttttatgcaaaaggtttattccggaaactagtgtacatttctataaatagatgctgtgtatatggtatatatacatatatatatataacatatatggaagaggaaaaggctggtacaacggaggcctgcgaccctgggggcacaggaggcaggcatggccctgggcggggcgtgggggggcgtggagggaggccccaggggtctcacccatgcaagcagaggaccagggctttttctggcaccgcagttttgttttaaaactggacctgtatatttgtaaagctatttatgggcccctggcactcttgttcccacaccccaacacttccagcatttagctggccacatggcggagagttttaatttttaacttattgacaaccgagaaggtttatcccgccgatagagggacggccaagaatgtacgtccagcctgccccggagctggaggatcccctccaagcctaaaaggttgttaatagttggaggtgattccagtgaagatattttatttgctttgtcctttttcaggagaattagatttctataggatttttctttaggagatttattttttggacttcaaagcaagctggtattttcatacaaattcttctaattgctgtgtgtcccaggcagggagacggtttccagggaggggccggccctgtgtgcaggttccgatgttattagatgttacaagtttatatatatctatatatataatttattgagtttttacaagatgtatttgttgtagacttaacacttcttacgcaatgcttctagagttttatagcctggactgctacctttcaaagcttggagggaagccgtgaattcagttggttcgttctgtactgttactgggccctgagtctgggcagctgtcccttgcttgcctgcagggccatggctcagggtggtctcttcttggggcccagtgcatggtggccagaggtgtcacccaaaccggcaggtgcgattttgttaacccagcgacgaactttccgaaaaataaagacacctggttgctaacctgaaaaaaaaaaaaaaaaaaaaaaaaaaaaaa

SEQ ID NO: 10505 - DNA, 3015 bp, Homo sapiens
  III.4133 (NM_002011)
ccgaggagcgctcgggctgtctgcggaccctgccgcgtgcaggggtcgcggccggctggagctgggagtgaggcggcggaggagccaggtgaggaggagccaggaaggcagttggtgggaagtccagcttgggtccctgagagctgtgagaaggagatgcggctgctgctggccctgttgggggtcctgctgagtgtgcctgggcctccagtcttgtccctggaggcctctgaggaagtggagcttgagccctgcctggctcccagcctggagcagcaagagcaggagctgacagtagcccttgggcagcctgtgcggctgtgctgtgggcgggctgagcgtggtggccactggtacaaggagggcagtcgcctggcacctgctggccgtgtacggggctggaggggccgcctagagattgccagcttcctacctgaggatgctggccgctacctctgcctggcacgaggctccatgatcgtcctgcagaatctcaccttgattacaggtgactccttgacctccagcaacgatgatgaggaccccaagtcccatagggacctctcgaataggcacagttacccccagcaagcaccctactggacacacccccagcgcatggagaagaaactgcatgcagtacctgcggggaacaccgtcaagttccgctgtccagctgcaggcaaccccacgcccaccatccgctggcttaaggatggacaggcctttcatggggagaaccgcattggaggcattcggctgcgccatcagcactggagtctcgtgatggagagcgtggtgccctcggaccgcggcacatacacctgcctggtagagaacgctgtgggcagcatccgctataactacctgctagatgtgctggagcggtccccgcaccggcccatcctgcaggccgggctcccggccaacaccacagccgtggtgggcagcgacgtggagctgctgtgcaaggtgtacagcgatgcccagccccacatccagtggctgaagcacatcgtcatcaacggcagcagcttcggagccgacggtttcccctatgtgcaagtcctaaagactgcagacatcaatagctcagaggtggaggtcctgtacctgcggaacgtgtcagccgaggacgcaggcgagtacacctgcctcgcaggcaattccatcggcctctcctaccagtctgcctggctcacggtgctgccagaggaggaccccacatggaccgcagcagcgcccgaggccaggtatacggacatcatcctgtacgcgtcgggctccctggccttggctgtgctcctgctgctggccgggctgtatcgagggcaggcgctccacggccggcacccccgcccgcccgccactgtgcagaagctctcccgcttccctctggcccgacagttctccctggagtcaggctcttccggcaagtcaagctcatccctggtacgaggcgtgcgtctctcctccagcggccccgccttgctcgccggcctcgtgagtctagatctacctctcgacccactatgggagttcccccgggacaggctggtgcttgggaagcccctaggcgagggctgctttggccaggtagtacgtgcagaggcctttggcatggaccctgcccggcctgaccaagccagcactgtggccgtcaagatgctcaaagacaacgcctctgacaaggacctggccgacctggtctcggagatggaggtgatgaagctgatcggccgacacaagaacatcatcaacctgcttggtgtctgcacccaggaagggcccctgtacgtgatcgtggagtgcgccgccaagggaaacctgcgggagttcctgcgggcccggcgccccccaggccccgacctcagccccgacggtcctcggagcagtgaggggccgctctccttcccagtcctggtctcctgcgcctaccaggtggcccgaggcatgcagtatctggagtcccggaagtgtatccaccgggacctggctgcccgcaatgtgctggtgactgaggacaatgtgatgaagattgctgactttgggctggcccgcggcgtccaccacattgactactataagaaaaccagcaacggccgcctgcctgtgaagtggatggcgcccgaggccttgtttgaccgggtgtacacacaccagagtgacgtgtggtcttttgggatcctgctatgggagatcttcaccctcgggggctccccgtatcctggcatcccggtggaggagctgttctcgctgctgcgggagggacatcggatggaccgacccccacactgccccccagagctgtacgggctgatgcgtgagtgctggcacgcagcgccctcccagaggcctaccttcaagcagctggtggaggcgctggacaaggtcctgctggccgtctctgaggagtacctcgacctccgcctgaccttcggaccctattccccctctggtggggacgccagcagcacctgctcctccagcgattctgtcttcagccacgaccccctgccattgggatccagctccttccccttcgggtctggggtgcagacatgagcaaggctcaaggctgtgcaggcacataggctggtggccttgggccttggggctcagccacagcctgacacagtgctcgaccttgatagcatggggcccctggcccagagttgctgtgccgtgtccaagggccgtgcccttgcccttggagctgccgtgcctgtgtcctgatggcccaaatgtcagggttctgctcggcttcttggaccatggcgcttagtccccatcccgggtttggctgagcctggctggagagctgctatgctaaacctcctgcctcccaataccagcaggaggttctgggcctctgaaccccctttccccacacctccccctgctgctgctgccccagcgtcttgacgggagcattggcccctgagcccagagaagctggaagcctgccgaaaacaggagcaaatggcgttttataaattatttttttgaaataaa

SEQ ID NO: 10506 - DNA, 2895 bp, Homo sapiens
  III.4134 (NM_022963)
ccgaggagcgctcgggctgtctgcggaccctgccgcgtgcaggggtcgcggccggctggagctgggagtgaggcggcggaggagccaggtgaggaggagccaggaaggcagttggtgggaagtccagcttgggtccctgagagctgtgagaaggagatgcggctgctgctggccctgttgggggtcctgctgagtgtgcctgggcctccagtcttgtccctggaggcctctgaggaagtggagcttgagccctgcctggctcccagcctggagcagcaagagcaggagctgacagtagcccttgggcagcctgtgcggctgtgctgtgggcgggctgagcgtggtggccactggtacaaggagggcagtcgcctggcacctgctggccgtgtacggggctggaggggccgcctagagattgccagcttcctacctgaggatgctggccgctacctctgcctggcacgaggctccatgatcgtcctgcagaatctcaccttgattacaggtgactccttgacctccagcaacgatgatgaggaccccaagtcccatagggacctctcgaataggcacagttacccccagcaagcaccctactggacacacccccagcgcatggagaagaaactgcatgcagtacctgcggggaacaccgtcaagttccgctgtccagctgcaggcaaccccacgcccaccatccgctggcttaaggatggacaggcctttcatggggagaaccgcattggaggcattcggctgcgccatcagcactggagtctcgtgatggagagcgtggtgccctcggaccgcggcacatacacctgcctggtagagaacgctgtgggcagcatccgctataactacctgctagatgtgctggagcggtccccgcaccggcccatcctgcaggccgggctcccggccaacaccacagccgtggtgggcagcgacgtggagctgctgtgcaaggtgtacagcgatgcccagccccacatccagtggctgaagcacatcgtcatcaacggcagcagcttcggagccgacggtttcccctatgtgcaagtcctaaagactgcagacatcaatagctcagaggtggaggtcctgtacctgcggaacgtgtcagccgaggacgcaggcgagtacacctgcctcgcaggcaattccatcggcctctcctaccagtctgcctggctcacggtgctgccaggtactgggcgcatcccccacctcacatgtgacagcctgactccagcaggcagaaccaagtctcccactttgcagttctccctggagtcaggctcttccggcaagtcaagctcatccctggtacgaggcgtgcgtctctcctccagcggccccgccttgctcgccggcctcgtgagtctagatctacctctcgacccactatgggagttcccccgggacaggctggtgcttgggaagcccctaggcgagggctgctttggccaggtagtacgtgcagaggcctttggcatggaccctgcccggcctgaccaagccagcactgtggccgtcaagatgctcaaagacaacgcctctgacaaggacctggccgacctggtctcggagatggaggtgatgaagctgatcggccgacacaagaacatcatcaacctgcttggtgtctgcacccaggaagggcccctgtacgtgatcgtggagtgcgccgccaagggaaacctgcgggagttcctgcgggcccggcgccccccaggccccgacctcagccccgacggtcctcggagcagtgaggggccgctctccttcccagtcctggtctcctgcgcctaccaggtggcccgaggcatgcagtatctggagtcccggaagtgtatccaccgggacctggctgcccgcaatgtgctggtgactgaggacaatgtgatgaagattgctgactttgggctggcccgcggcgtccaccacattgactactataagaaaaccagcaacggccgcctgcctgtgaagtggatggcgcccgaggccttgtttgaccgggtgtacacacaccagagtgacgtgtggtcttttgggatcctgctatgggagatcttcaccctcgggggctccccgtatcctggcatcccggtggaggagctgttctcgctgctgcgggagggacatcggatggaccgacccccacactgccccccagagctgtacgggctgatgcgtgagtgctggcacgcagcgccctcccagaggcctaccttcaagcagctggtggaggcgctggacaaggtcctgctggccgtctctgaggagtacctcgacctccgcctgaccttcggaccctattccccctctggtggggacgccagcagcacctgctcctccagcgattctgtcttcagccacgaccccctgccattgggatccagctccttccccttcgggtctggggtgcagacatgagcaaggctcaaggctgtgcaggcacataggctggtggccttgggccttggggctcagccacagcctgacacagtgctcgaccttgatagcatggggcccctggcccagagttgctgtgccgtgtccaagggccgtgcccttgcccttggagctgccgtgcctgtgtcctgatggcccaaatgtcagggttctgctcggcttcttggaccatggcgcttagtccccatcccgggtttggctgagcctggctggagagctgctatgctaaacctcctgcctcccaataccagcaggaggttctgggcctctgaaccccctttccccacacctccccctgctgctgctgccccagcgtcttgacgggagcattggcccctgagcccagagaagctggaagcctgccgaaaacaggagcaaatggcgttttataaattatttttttgaaataaa

SEQ ID NO: 10507 - DNA, 2279 bp, Homo sapiens
  III.4135 (NM_014303)
cttggcagggcacgtgcgggaggaagtggagctccctgtacgcgcggccctagtcggctcctcaacgtggagcgatgggaggccttgagaagaagaagtatgaacgaggctcggccaccaactacatcacccggaacaaagcccggaagaagctccagctgagcttggctgactttaggcggctgtgcattctgaagggcatttatccccatgaacccaaacacaagaagaaggttaacaagggttctacagcagcccgaacgttttaccttatcaaagacatcaggtttctcctccacgaacccattgtcaacaagttccgtgaatacaaggtgttcgtccggaagctccggaaggcttatgggaagagcgagtggaacactgtagagcgtttaaaggacaataagcccaactacaaactcgaccacatcatcaaggaacggtatcccacgttcatcgatgccctgcgggacctggacgatgccctctccatgtgcttcctgttttccaccttcccgcggactggcaagtgccacgtgcagaccattcagctgtgccgccggctcactgtggagttcatgcactacattatcgctgcccgtgccctgcgcaaggtcttcctgtccatcaaaggcatttactaccaggccgaggtactggggcagcccatcgtgtggatcactccctatgccttctcccatgaccacccgacagacgtggactacagggtcatggccaccttcaccgagttctacaccacgctgctgggctttgtcaacttccgcctttaccagttgctcaacctccactatcccccgaagctcgagggtcaggcccaagcagaggcaaaggccggtgagggcacctacgcgttggactccgagagttgtatggagaaactggcagccctcagtgccagcctggcccgcgtggtggtgcctgccacagaggaggaggccgaggtggatgagtttcccaccgatggggagatgtcagcgcaggaggaagaccgcaggaaggagctggaggcgcaggagaagcacaagaagctttttgagggcctgaagttcttcctgaaccgagaggtgccccgtgaggccctggccttcatcatcaggagttttggtggggaagtgtcctgggacaaatctttgtgcattggggccacctatgacgtcacagactcccgcatcacccatcagattgtcgaccggcctgggcagcagacctcagtcattggcaggtgctacgtgcagccccagtgggtgtttgactcagtgaacgccaggctccttctccccgtggcagagtacttctctggggtgcagctgcccccacacctttcaccctttgtgaccgagaaggaaggagattacgttccacctgagaagctgaagctgctggctctgcagcggggagaggacccaggaaacctgaatgagtcagaagaggaggaggaagaggacgacaacaacgaaggtgatggtgatgaagagggagaaaatgaggaggaggaggaagatgcagaggctggttcagaaaaggaggaagaggcccggctggcagccctggaagagcagaggatggaggggaagaagcccagggtgatggcaggcaccttgaagctggaggataagcagcggctggcccaggaggaggagagtgaggccaagcgcctggccattatgatgatgaagaagcgggagaagtacctgtaccagaagatcatgtttggcaagaggcgaaaaatccgagaggccaacaagctggcggagaagcggaaagcccacgatgaggcggtgaggtctgagaagaaggccaagaaggcaaggccggagtgagtgcctgcggcccctcacagggctgaggccagcccctagcagctggatgtggcagaggcaggccagaggacctaagtgtgatggaccagagtcacttctcctcctcctttctccagccagccctgacccctcatgctctctggctgggccagtgggcagccctcgcttcccttggatggagctgccctgctggtgcctggtcagagaagaggcctctgtgcccagcctgattctctgctcccaggagccagtgacatgaggtgcagaggcccacccagccccctacctactgcccccattcatcctggctttccacagccccctcccacacagttggacccgtgattctcagggtgctgtgatggggtgagggtagggggagcatttgttattaaatgactggacttttgtgccaattgcaaaaaaaaaaaaaaaaaa

SEQ ID NO: 10508 - DNA, 1283 bp, Homo sapiens
  III.4136 (NM_002046)
ctctctgctcctcctgttcgacagtcagccgcatcttcttttgcgtcgccagccgagccacatcgctcagacaccatggggaaggtgaaggtcggagtcaacggatttggtcgtattgggcgcctggtcaccagggctgcttttaactctggtaaagtggatattgttgccatcaatgaccccttcattgacctcaactacatggtttacatgttccaatatgattccacccatggcaaattccatggcaccgtcaaggctgagaacgggaagcttgtcatcaatggaaatcccatcaccatcttccaggagcgagatccctccaaaatcaagtggggcgatgctggcgctgagtacgtcgtggagtccactggcgtcttcaccaccatggagaaggctggggctcatttgcaggggggagccaaaagggtcatcatctctgccccctctgctgatgcccccatgttcgtcatgggtgtgaaccatgagaagtatgacaacagcctcaagatcatcagcaatgcctcctgcaccaccaactgcttagcacccctggccaaggtcatccatgacaactttggtatcgtggaaggactcatgaccacagtccatgccatcactgccacccagaagactgtggatggcccctccgggaaactgtggcgtgatggccgcggggctctccagaacatcatccctgcctctactggcgctgccaaggctgtgggcaaggtcatccctgagctgaacgggaagctcactggcatggccttccgtgtccccactgccaacgtgtcagtggtggacctgacctgccgtctagaaaaacctgccaaatatgatgacatcaagaaggtggtgaagcaggcgtcggagggccccctcaagggcatcctgggctacactgagcaccaggtggtctcctctgacttcaacagcgacacccactcctccacctttgacgctggggctggcattgccctcaacgaccactttgtcaagctcatttcctggtatgacaacgaatttggctacagcaacagggtggtggacctcatggcccacatggcctccaaggagtaagacccctggaccaccagccccagcaagagcacaagaggaagagagagaccctcactgctggggagtccctgccacactcagtcccccaccacactgaatctcccctcctcacagttgccatgtagaccccttgaagaggggaggggcctagggagccgcaccttgtcatgtaccatcaataaagtaccctgtgctcaacc

SEQ ID NO: 10509 - DNA, 865 bp, Homo sapiens
  III.4137 (NM_001540)
ctcaaacaccgcctgctaaaaatacccgactggaggagcataaaagcgcagccgagcccagcgccccgcacttttctgagcagacgtccagagcagagtcagccagcatgaccgagcgccgcgtccccttctcgctcctgcggggccccagctgggaccccttccgcgactggtacccgcatagccgcctcttcgaccaggccttcgggctgccccggctgccggaggagtggtcgcagtggttaggcggcagcagctggccaggctacgtgcgccccctgccccccgccgccatcgagagccccgcagtggccgcgcccgcctacagccgcgcgctcagccggcaactcagcagcggggtctcggagatccggcacactgcggaccgctggcgcgtgtccctggatgtcaaccacttcgccccggacgagctgacggtcaagaccaaggatggcgtggtggagatcaccggcaagcacgaggagcggcaggacgagcatggctacatctcccggtgcttcacgcggaaatacacgctgccccccggtgtggaccccacccaagtttcctcctccctgtcccctgagggcacactgaccgtggaggcccccatgcccaagctagccacgcagtccaacgagatcaccatcccagtcaccttcgagtcgcgggcccagcttgggggcccagaagctgcaaaatccgatgagactgccgccaagtaaagccttagcctggatgcccacccctgctgccgccactggctgtgcctcccccgccacctgtgtgttcttttgatacatttatcttctgtttttctcaaataaagttcaaagcaaccacctgtaaaaaaaaaaaaaaaaaa

SEQ ID NO: 10510 - DNA, 820 bp, Homo sapiens
  III.4138 (NM_001541)
cgctgcgcctgttggggctgcacctcggaccagggcttctgctgcatctgcagccatgtcgggccgctcagtgccacatgcccacccggccaccgccgagtacgaatttgccaacccgagccgcctgggtgagcagcgcttcggagaaggcctcctgccagaagagatcctgacccccacactctaccatggctactatgtccggcctcgggccgccccagctggggagggcagcagggcaggggcctccgagcttaggctcagtgagggcaagttccaggcatttctggatgtgagccactttaccccagacgaggtgactgtgaggactgtggataacctgctggaggtgtctgcccggcacccccagcgcctggaccgccacggcttcgtgtcccgagagttctgccgcacctatgtcctgcctgctgatgtcgacccctggcgagtccgagctgctctctcccatgatggcatcttaaacctggaagcacctcggggtggccgacatttggacacagaggtcaatgaggtctacatctccctgctccctgcgcctcctgatccagaggaagaggaggaggcagccatagttgagccctgattgccacagacccagcacccagcaaatccctctctacctcccaaggtgatatgggcagctgcccaccactccagaggtagcagcatccttgggggaagggaaaggtgcatggtccacaatgtatggtttggtcccatgggacatgtcatagccttggtttagttttgggtggagctgaataaacccaaatttcagggcaaaaaaaaaaaaaaaaaa

SEQ ID NO: 10511 - DNA, 764 bp, Homo sapiens
  III.4139 (NM_006308)
gcattccgtgctatgattcaggcctaattaagtgattgcgtctgggcacggctataaaccactagctgcttcaactggtaatccagtcagtaggcaactgcaggggctcgccactgactgaaggcagtggaaggttggcagaaggaggctgttcaaggctgtttttgccttcactatggcaaaaatcattttgaggcacctcatagagattccagtgcgttaccaggaagagtttgaagctcgaggtctagaagactgcaggctggatcatgctttatatgcactgcctgggccaaccatcgtggacctgaggaaaaccagggcagcgcagtctcctccagtggactcagcggcagagacgccaccccgagaaggcaaatcccactttcagatcctgctggacgtggtccagttcctccctgaagacatcatcattcagaccttcgaaggctggctactgataaaagcacaacacggaaccagaatggatgagcacggttttatctcaagaagcttcacccgacagtacaaactaccagatggcgtggaaatcaaagatttgtctgcagtcctctgtcatgatggaattttggtggtggaagtaaaggatccagttgggactaagtgacatcgtatcggttcctgttcagatgacatggggaagatgatggttcagccactggtactacgagaatgtttgtattacccacatttgaaatgatttgctatgatttttatgaagaataaaaatatatacacagtta

SEQ ID NO: 10512 - DNA, 2598 bp, Homo sapiens
  III.4140 (NM_014424)
ggcacgaggcaaggagcctgcacactgatggaggaggtacagccgtggaggagaaccagagtctggaggggaggcacagtcctcaggagcccccaggctgacaggggaaacaaaacacacaataaaccccaaacttgcaaggttctggggcaggcaccgaggtccgagtggcaaggagacaggatccagccctgtgcagtggtgaggaggcccctggggctgctgtgatcggcctggaatgtcaggctgtgagctcagccctctcggcctgcgtgtcgggctgtcagcagggccggtgcacgggagaagatttccagccccctctgggccatggacaggcctaaatttagctagtagacaaggggctggccccaagcccagggacagtcggccttataaagcggccgcagtcggagcctggcacgctcgcccagaggcctgcgcccacaccctctcctgtccagccttcgcccgcctgggcagggcccggcgccgtccgtggatgagccacagaacctcttccaccttccgagcggagagaagtttccattcctcttcttcttcctcctcctcttccacctcctcctcggcctcccgtgccctcccggcccaggacccgcccatggagaaggccctgagcatgttttccgatgactttggcagcttcatgcggccccactcggagcccctggccttcccagcccgccccggtggggcaggcaacatcaagaccctaggagacgcctatgagtttgcggtggacgtgagagacttctcacctgaagacatcattgtcaccacctccaacaaccacatcgaggtgcgggctgagaagctggcggctgacggcaccgtcatgaacaccttcgctcacaagtgccagctgccggaggacgtggacccgacgtcggtgacctcggctctgcgggaggacggcagcctcactatccgggcacggcgtcacccgcatacagaacacgtccagcagaccttccggacggagatcaaaatctgagtgcctctcccttccctttccctgtccccccgccccacgcctgccagcaaagcctcgctaaccccattacaacagctccaggacatctcagcccaggttctagcccccacgcaccccagaccccaggtggaccatcctcccaaactagggccctccactctatccagggcaggccagggactccctggcctgacacatgatgcccagatttcagatttggcctccgtcacttaatccagagtacaggggctggggtcagggaaggaagatctaaagaacccactgtgggtcaggggaatgggaccagcaggacatatgggcaagctctgcaggacagacaggcagacaaaccctctgatctatgaagtctctgcagggcaaggggaccagggacctggaaccctcttggccaaggggagtgggaacgacagagggaaggtcacaggcaagggtgcctatctaagtggaactaattgcccgagggctcagcaaggccaagaggagacagccgtgacggtaaacttcccctctaccagcctccaagccccacgccagcgagcaggctgcctgcccaccccgtgcccccagccagctggctgtgccagggcagagccatgccacatctgtatatagatggggtttttccaatacagctggttcgtgataaactgcatgaaactcctgccgtcctgcgcctgctggggcctccaggcaaggccacgtggggttgggggtggggctggtccttctccctcccacaggcctgtgttcttggggctgctcccatgcagacaggatcacctaacagagatggaagccagggcatggatggggctttgggtcctcgaggttggaccccagcttcttgccaccttcccctccgggcagtcagctctccatccatccccctctttaatctatgaatctataggctcggtgtgtgtaacacacacacccctatcgttgtccttcaaatactcagcattaccattggttgaggccaaattcagagctttctcaaatcagatttacaatctccattttcattaacggggaaacatccccgagccactgagtgctgtgctttgtcactgaaggttagatctgaacccagggtgtcaacagctgctctcaactccccacctctgggcactgaggagtatttcccctcattctacctctctaaggctatgcacccctccccacgtcttccagctgggggatggggggagtcataggaaaagcccccatctcccatctgggatagggaccttccatcagccttaaccctgggaaatgcctgctgcccccagtgactcttggtttcgtctcccacatacagaagcagggtggaggggaagggtgggtctcagttagcaggggtccccagggcaagtcagcctcctccctccatgcctctctggtcagtgtgccttagggtggcctctcactcccaccactctgggccccttgggggaggactggggagggggccgtgggagagccctgacgctggaacctgtatacacaataaaggacagtctcacagaaaaaaaaaaaaaaaaaaaaaaaaaaaaaaaaaa

SEQ ID NO: 10513 - DNA, 1114 bp, Homo sapiens
  III.4141 (NM_000394)
acactgcgctgcccagaggccccgctgactcctgccagcctccaggtccccgtggtaccaaagctgaacatggacgtgaccatccagcacccctggttcaagcgcaccctggggcccttctaccccagccggctgttcgaccagtttttcggcgagggcctttttgagtatgacctgctgcccttcctgtcgtccaccatcagcccctactaccgccagtccctcttccgcaccgtgctggactccggcatctctgaggttcgatccgaccgggacaagttcgtcatcttcctcgatgtgaagcacttctccccggaggacctcaccgtgaaggtgcaggacgactttgtggagatccacggaaagcacaacgagcgccaggacgaccacggctacatttcccgtgagttccaccgccgctaccgcctgccgtccaacgtggaccagtcggccctctcttgctccctgtctgccgatggcatgctgaccttctgtggccccaagatccagactggcctggatgccacccacgccgagcgagccatccccgtgtcgcgggaggagaagcccacctcggctccctcgtcctaagcaggcattgcctcggctggctcccctgcagccctggcccatcatggggggagcaccctgagggcggggtgtctgtcttcctttgcttcccttttttcctttccaccttctcacatggaatgagggtttgagagagcagccaggagagcttagggtctcagggtgtcccagaccccgacaccggccagtggcggaagtgaccgcacctcacactcctttagatagcagcctggctcccctggggtgcaggcgcctcaactctgctgagggtccagaaggagggggtgacctccggccaggtgcctcctgacacacctgcagcctccctccgcggcgggccctgcccacacctcctggggcgcgtgaggcccgtggggccggggcttctgtgcacctgggctctcgcggcctcttctctcagaccgtcttcctccaacccctctatgtagtgccgctcttggggacatgggtcgcccatgagagcgcagcccgcggcaatcaataaacagcaggtgatacaagc

SEQ ID NO: 10514 - DNA, 691 bp, Homo sapiens
  III.4142 (NM_001885)
gacccctcacactcacctagccaccatggacatcgccatccaccacccctggatccgccgccccttctttcctttccactcccccagccgcctctttgaccagttcttcggagagcacctgttggagtctgatcttttcccgacgtctacttccctgagtcccttctaccttcggccaccctccttcctgcgggcacccagctggtttgacactggactctcagagatgcgcctggagaaggacaggttctctgtcaacctggatgtgaagcacttctccccagaggaactcaaagttaaggtgttgggagatgtgattgaggtgcatggaaaacatgaagagcgccaggatgaacatggtttcatctccagggagttccacaggaaataccggatcccagctgatgtagaccctctcaccattacttcatccctgtcatctgatggggtcctcactgtgaatggaccaaggaaacaggtctctggccctgagcgcaccattcccatcacccgtgaagagaagcctgctgtcaccgcagcccccaagaaatagatgccctttcttgaattgcattttttaaaacaagaaagtttccccaccagtgaatgaaagtcttgtgactagtgctgaagcttattaatgctaagggcaggcccaaattatcaagctaataaaatatcattcagcaac

SEQ ID NO: 10515 - DNA, 983 bp, Homo sapiens
  III.4143 (NM_024410)
atttttaaaagcaacttctgagaagggcttagaacaaattttttcccggagtgccatttcccaaaggtactcacagaacaatcaggtgtgaccataatggctgcactgagttgtctcttggacagtgtcagaagggacataaagaaggtggacagagaactaaggcaactgagatgcatcgacgaatttagcacacggtgcctgtgcgacttgtatatgcacccctattgctgctgtgacttgcacccatatccgtactgcttgtgctattccaagcgatcacgctcttgcggcctgtgtgatctctacccatgttgcctgtgtgattataagctttactgtctgcgaccatctctcagaagtttggagaggaaagccatcagagccatagaagatgagaagcgagagcttgccaaactgagaagaacaacaaatagaattctggcttcctcctgctgtagcagtaacattttaggatcggtgaatgtatgcggttttgaacccgatcaagtcaaagttcgagtgaaggatggaaaggtatgtgtgtcggctgagcgggagaacaggtacgactgccttggatcgaaaaagtacagctacatgaacatctgcaaagagttcagcttgccgccctgtgtggatgagaaggatgtaacatactcctatgggctcggcagctgtgtcaagatcgagtctccttgctacccttgcacttctccttgcagcccgtgcagcccgtgcaacccctgcaacccctgcagcccctgcaacccgtgcagcccatatgatccttgcaacccgtgttatccctgtggaagccgattttcctgtaggaagatgattttgtaaagtgcgcataggaacccattacttaatagaagtcagttactccagccaggcagctctcccaatgtttctcctctccttcccatggcccctgttgttgaagtacgtaggaaactgaatacataactgcaatctgc

SEQ ID NO: 10516 - DNA, 306 bp, Homo sapiens
  III.4144 (NM_005543)
atggacccccgtctgcccgcctgggcgctggtgctgctgggccctgccctggtgttcgcgttgggccccgcgcccaccccagagatgcgtgagaagttgtgcggccaccacttcgtacgcgcgctggtgcgcgtgtgcgggggcccccgctggtccaccgaagccaggaggcctgcggccggaggcgacctgccccagacctctcaccatcaccgccaccaccgtgcagctgccaccaaccctgcacgctactgctgcctcagtggctgtacccaacaagacctgctgaccctctgtccctactga

SEQ ID NO: 10517 - DNA, 617 bp, Homo sapiens
  III.4145 (NM_002195)
agtctggagcccagaagggacacaccagcacagtctggtaggctacagcagcaagtctctaaagaaaggctgagaacacccagaacaggagagttcaggtccaggatggccagcctgttccggtcctatctgccagcaatctggctgctgctgagccaactccttagagaaagcctagcagcagagctgaggggatgtggtccccgatttggaaaacacttgctgtcatattgccccatgcctgagaagacattcaccaccaccccaggagggtggctgctggaatctggacgtcccaaagaaatggtgtcaacctccaacaacaaagatggacaagccttaggtacgacatcagaattcattcctaatttgtcaccagagctgaagaaaccactgtctgaagggcagccatcattgaagaaaataatactttcccgcaaaaagagaagtggacgtcacagatttgatccattctgttgtgaagtaatttgtgacgatggaacttcagttaaattatgtacatagtagagtaatcatggactggacatctcatccattctcatatgtattctcaatgacaaattcactgatgcccaattaaatgattgctgtttaaa

SEQ ID NO: 10518 - DNA, 726 bp, Homo sapiens
  III.4146 (NM_005478)
cggacgcgtgggttaccatatcagattcacattcagtcctcagcaaaatgaagggctccattttcactctgtttttattctctgtcctatttgccatctcagaagtgcggagcaaggagtctgtgagactctgtgggctagaatacatacggacagtcatctatatctgtgctagctccaggtggagaaggcatctggaggggatccctcaagctcagcaagctgagacaggaaactccttccagctcccacataaacgtgagttttctgaggaaaatccagcgcaaaaccttccgaaggtggatgcctcaggggaagaccgtctttggggtggacagatgcccactgaagagctttggaagtcaaagaagcattcagtgatgtcaagacaagatttacaaactttgtgttgcactgatggctgttccatgactgatttgagtgctctttgctaagacaagagcaaatacccaatgggtggcagagctttatcacatgtttaattacagtgttttactgcctggtagaacactaatattgtgttattaaaatgatggcttttgggtaggcaaaacttcttttctaaaggtatagctgagcggttgaaaccacagtgatctctattttctccctttgccaaggttaatgaactgttcttttcaaattctactaatgctttgaaatttcaaatgctgcgcaaaattgcaataaaaatgctataaacca

SEQ ID NO: 10519 - DNA, 703 bp, Homo sapiens
  III.4147 (NM_007179)
gcctggggtcacagggatgccgcggctcctccgcttgtccctgctgtggcttggactcctgctggttcggttttctcgtgaactgagcgacatcagcagtgccaggaagctgtgcggcaggtacttggtgaaagaaatagaaaaactctgcggccatgccaactggagccagttccgtttcgaggaggaaacccctttctcacggttgattgcacaggcctcggagaaggtcgaagcctacagcccataccagttcgaaagcccgcaaaccgcttccccggcccggggaagaggcacaaacccagtgtctacttcttgggaagaagcagtaaacagttgggaaatgcagtcactacctgagtataaggataaaaagggatattcaccccttggtaagacaagagaattttcttcatcacataatatcaatgtatatattcatgagaatgcattttttcagaagaaacgtagaaacaaaattaaaaccttaagcaatttgttttgggggcatcatccccaaagaaaacgcagaggatattcagaaaagtgttgtcttacaggatgtacaaaagaagaacttagcattgcatgtcttccatatattgattttaaaaggctaaaggaaaaaagatcatcacttgtaactaagatatactaaccatcttagaattttttctaacctaataaaagcttaatacattta

SEQ ID NO: 10520 - DNA, 2846 bp, Homo sapiens
  III.4148 (NM_021082)
aaatgcttgaggagagagagagagtaaggagccagccatgaatcctttccagaaaaatgagtccaaggaaactcttttttcacctgtctccattgaagaggtaccacctcgaccacctagccctccaaagaagccatctccgacaatctgtggctccaactatccactgagcattgccttcattgtggtgaatgaattctgcgagcgcttttcctattatggaatgaaagctgtgctgatcctgtatttcctgtatttcctgcactggaatgaagatacctccacatctatataccatgccttcagcagcctctgttattttactcccatcctgggagcagccattgctgactcgtggttgggaaaattcaagacaatcatctatctctccttggtgtatgtgcttggccatgtgatcaagtccttgggtgccttaccaatactgggaggacaagtggtacacacagtcctatcattgatcggcctgagtctaatagctttggggacaggaggcatcaaaccctgtgtggcagcttttggtggagaccagtttgaagaaaaacatgcagaggaacggactagatacttctcagtcttctacctgtccatcaatgcagggagcttgatttctacatttatcacacccatgctgagaggagatgtgcaatgttttggagaagactgctatgcattggcttttggagttccaggactgctcatggtaattgcacttgttgtgtttgcaatgggaagcaaaatatacaataaaccaccccctgaaggaaacatagtggctcaagttttcaaatgtatctggtttgctatttccaatcgtttcaagaaccgttctggagacattccaaagcgacagcactggctagactgggcggctgagaaatatccaaagcagctcattatggatgtaaaggcactgaccagggtactattcctttatatcccattgcccatgttctgggctcttttggatcagcagggttcacgatggactttgcaagccatcaggatgaataggaatttggggttttttgtgcttcagccggaccagatgcaggttctaaatccccttctggttcttatcttcatcccgttgtttgactttgtcatttatcgtctggtctccaagtgtggaattaacttctcatcacttaggaaaatggctgttggtatgatcctagcatgcctggcatttgcagttgcggcagctgtagagataaaaataaatgaaatggccccagcccagccaggtccccaggaggttttcctacaagtcttgaatctggcagatgatgaggtgaaggtgacagtggtgggaaatgaaaacaattctctgttgatagagtccatcaaatcctttcagaaaacaccacactattccaaactgcacctgaaaacaaaaagccaggattttcacttccacctgaaatatcacaatttgtctctctacactgagcattctgtgcaggagaagaactggtacagtcttgtcattcgtgaagatgggaacagtatctccagcatgatggtaaaggatacagaaagcagaacaaccaatgggatgacaaccgtgaggtttgttaacactttgcataaagatgtcaacatctccctgagtacagatacctctctcaatgttggtgaagactatggtgtgtctgcttatagaactgtgcaaagaggagaataccctgcagtgcactgtagaacagaagataagaacttttctctgaatttgggtcttctagactttggtgcagcatatctgtttgttattactaataacaccaatcagggtcttcaggcctggaagattgaagacattccagccaacaaaatgtccattgcgtggcagctaccacaatatgccctggttacagctggggaggtcatgttctctgtcacaggtcttgagttttcttattctcaggctccctctggcatgaaatctgtgctccaggcagcttggctattgacaattgcagttgggaatatcatcgtgcttgttgtggcacagttcagtggcctggtacagtgggccgaattcattttgttttcctgcctcctgctggtgatctgcctgatcttctccatcatgggctactactatgttcctgtaaagacagaggatatgcggggtccagcagataagcacattcctcacatccaggggaacatgatcaaactagagaccaagaagacaaaactctgatgactccctagattctgtcctgaccccaattcctggccctgtcttgaagcattttttttcttctactggattagacaagagagatagcagcatatcagagctgatctcctccacctttctccaatgacagaagttccaggactggttttccagtacatctttaaacaaggccccagagactctatgtctgcccgtccatcagtgaactcattaaaacttgtgcagtgttgctggagctggcctggtgtctccaaatgaccatgaaaatacacacgtataatggagatcattctctgtgggtatgcaaagttatgggaattcctttataggtaactgccatttaggactgatggccctaatttttgaggtgctgatttagaggcaaaattgcagaataacaaagaaatggtatttcaagtttttttttttataagcaatgtaattatgctattcacaggggcctcaagaattggtatgtatgatgtgatctggtccagccagggcctggcttgtcagctctctaggtttgatatgactttagtaaatttgtcaatatagatggtaggaagcagaatgccattttattaaaacacaggagaagttaaaaaaaaaaaaaaaa

SEQ ID NO: 10521 - DNA, 14392 bp, Homo sapiens
  III.4149 (NM_004525)
gcagacctaaaggagcgttcgctagcagaggcgctgccggtgcggtgtgctacgcgcgcccacctcccggggaaggaacggcgaggccggggaccgtcgcggagatggatcgcgggccggcagcagtggcgtgcacgctgctcctggctctcgtcgcctgcctagcgccggccagtggccaagaatgtgacagtgcgcattttcgctgtggaagtgggcattgcatccctgcagactggaggtgtgatgggaccaaagactgttcagatgacgcggatgaaattggctgcgctgttgtgacctgccagcagggctatttcaagtgccagagtgagggacaatgcatccccagctcctgggtgtgtgaccaagatcaagactgtgatgatggctcagatgaacgtcaagattgctcacaaagtacatgctcaagtcatcagataacatgctccaatggtcagtgtatcccaagtgaatacaggtgcgaccacgtcagagactgccccgatggagctgatgagaatgactgccagtacccaacatgtgagcagcttacttgtgacaatggggcctgctataacaccagtcagaagtgtgattggaaagttgattgcagggactcctcagatgaaatcaactgcactgagatatgcttgcacaatgagttttcatgtggcaatggagagtgtatccctcgtgcttatgtctgtgaccatgacaatgattgccaagacggcagtgatgaacatgcttgcaactatccgacctgcggtggttaccagttcacttgccccagtggccgatgcatttatcaaaactgggtttgtgatggagaagatgactgtaaagataatggagatgaagatggatgtgaaagcggtcctcatgatgttcataaatgttccccaagagaatggtcttgcccagagtcgggacgatgcatctccatttataaagtttgtgatgggattttagattgcccaggaagagaagatgaaaacaacactagtaccggaaaatactgtagtatgactctgtgctctgccttgaactgccagtaccagtgccatgagacgccgtatggaggagcgtgtttttgtcccccaggttatatcatcaaccacaatgacagccgtacctgtgttgagtttgatgattgccagatatggggaatttgtgaccagaagtgtgaaagccgacctggccgtcacctgtgccactgtgaagaagggtatatcttggagcgtggacagtattgcaaagctaatgattcctttggcgaggcctccattatcttctccaatggtcgggatttgttaattggtgatattcatggaaggagcttccggatcctagtggagtctcagaatcgtggagtggccgtgggtgtggctttccactatcacctgcaaagagttttttggacagacaccgtgcaaaataaggttttttcagttgacattaatggtttaaatatccaagaggttctcaatgtttctgttgaaaccccagagaacctggctgtggactgggttaataataaaatctatctagtggaaaccaaggtcaaccgcatagatatggtaaatttggatggaagctatcgggttacccttataactgaaaacttggggcatcctagaggaattgccgtggacccaactgttggttatttatttttctcagattgggagagcctttctggggaacctaagctggaaagggcattcatggatggcagcaaccgtaaagacttggtgaaaacaaagctgggatggcctgctggggtaactctggatatgatatcgaagcgtgtttactgggttgactctcggtttgattacattgaaactgtaacttatgatggaattcaaaggaagactgtagttcatggaggctccctcattcctcatccctttggagtaagcttatttgaaggtcaggtgttctttacagattggacaaagatggccgtgctgaaggcaaacaagttcacagagaccaacccacaagtgtactaccaggcttccctgaggccctatggagtgactgtttaccattccctcagacagccctatgctaccaatccgtgtaaagataacaatgggggctgtgagcaggtctgtgttctcagccacagaacagataatgatggtttgggtttccgttgcaagtgcacattcggcttccaactggatacagatgagcgccactgcattgctgttcagaatttcctcattttttcatcccaagttgctattcgtgggatcccgttcaccttgtctacccaggaagatgtcatggttccagtttcggggaatccttctttctttgtcgggattgattttgacgcccaggacagcactatctttttttcagatatgtcaaaacacatgatttttaagcaaaagattgatggcacaggaagagaaattctcgcagctaacagggtggaaaatgttgaaagtttggcttttgattggatttcaaagaatctctattggacagactctcattacaagagtatcagtgtcatgaggctagctgataaaacgagacgcacagtagttcagtatttaaataacccacggtcggtggtagttcatccttttgccgggtatctattcttcactgattggttccgtcctgctaaaattatgagagcatggagtgacggatctcacctcttgcctgtaataaacactactcttggatggcccaatggcttggccatcgattgggctgcttcacgattgtactgggtagatgcctattttgataaaattgagcacagcacctttgatggtttagacagaagaagactgggccatatagagcagatgacacatccgtttggacttgccatctttggagagcatttattttttactgactggagactgggtgccattattcgagtcaggaaagcagatggtggagaaatgacagttatccgaagtggcattgcttacatactgcatttgaaatcgtatgatgtcaacatccagactggttctaacgcctgtaatcaacccacgcatcctaacggtgactgcagccacttctgcttcccggtgccaaatttccagcgagtgtgtgggtgcccttatggaatgaggctggcttccaatcacttgacatgcgagggggacccaaccaatgaaccacccacggagcagtgtggcttattttccttcccctgtaaaaatggcagatgtgtgcccaattactatctctgtgatggagtcgatgattgtcatgataacagtgatgagcaactatgtggcacacttaataatacctgttcatcttcggcgttcacctgtggccatggggagtgcattcctgcacactggcgctgtgacaaacgcaacgactgtgtggatggcagtgatgagcacaactgccccacccacgcacctgcttcctgccttgacacccaatacacctgtgataatcaccagtgtatctcaaagaactgggtctgtgacacagacaatgattgtggggatggatctgatgaaaagaactgcaattcgacagagacatgccaacctagtcagtttaattgccccaatcatcgatgtattgacctatcgtttgtctgtgatggtgacaaggattgtgttgatggatctgatgaggttggttgtgtattaaactgtactgcttctcaattcaagtgtgccagtggggataaatgtattggcgtcacaaatcgttgtgatggtgtttttgattgcagtgacaactcggatgaagcgggctgtccaaccaggcctcctggtatgtgccactcagatgaatttcagtgccaagaagatggtatctgcatcccgaacttctgggaatgtgatgggcatccagactgcctctatggatctgatgagcacaatgcctgtgtccccaagacttgcccttcatcatatttccactgtgacaacggaaactgcatccacagggcatggctctgtgatcgggacaatgactgcggggatatgagtgatgagaaggactgccctactcagccctttcgctgtcctagttggcaatggcagtgtcttggccataacatctgtgtgaatctgagtgtagtgtgtgatggcatctttgactgccccaatgggacagatgagtccccactttgcaatgggaacagctgctcagatttcaatggtggttgtactcacgagtgtgttcaagagccctttggggctaaatgcctatgtccattgggattcttacttgccaatgattctaagacctgtgaagacatagatgaatgtgatattctaggctcttgtagccagcactgttacaatatgagaggttctttccggtgctcgtgtgatacaggctacatgttagaaagtgatgggaggacttgcaaagttacagcatctgagagtctgctgttacttgtggcaagtcagaacaaaattattgccgacagtgtcacctcccaggtccacaatatctattcattggtcgagaatggttcttacattgtagctgttgattttgattcaattagtggtcgtatcttttggtctgatgcaactcagggtaaaacctggagtgcgtttcaaaatggaacggacagaagagtggtatttgacagtagcatcatcttgactgaaactattgcaatagattgggtaggtcgtaatctttactggacagactatgctctggaaacaattgaagtctccaaaattgatgggagccacaggactgtgctgattagtaaaaacctaacaaatccaagaggactagcattagatcccagaatgaatgagcatctactgttctggtctgactggggccaccaccctcgcatcgagcgagccagcatggacggcagcatgcgcactgtcattgtccaggacaagatcttctggccctgcggcttaactattgactaccccaacagactgctctacttcatggactcctatcttgattacatggacttttgcgattataatggacaccatcggagacaggtgatagccagtgatttgattatacggcacccctatgccctaactctctttgaagactctgtgtactggactgaccgtgctactcgtcgggttatgcgagccaacaagtggcatggagggaaccagtcagttgtaatgtataatattcaatggccccttgggattgttgcggttcatccttcgaaacaaccaaattccgtgaatccatgtgccttttcccgctgcagccatctctgcctgctttcctcacaggggcctcatttttactcctgtgtttgtccttcaggatggagtctgtctcctgatctcctgaattgcttgagagatgatcaacctttcttaataactgtaaggcaacatataatttttggaatctcccttaatcctgaggtgaagagcaatgatgctatggtccccatagcagggatacagaatggtttagatgttgaatttgatgatgctgagcaatacatctattgggttgaaaatccaggtgaaattcacagagtgaagacagatggcaccaacaggacagtatttgcttctatatctatggtggggccttctatgaacctggccttagattggatttcaagaaacctttattctaccaatcctagaactcagtcaatcgaggttttgacactccacggagatatcagatacagaaaaacattgattgccaatgatgggacagctcttggagttggctttccaattggcataactgttgatcctgctcgtgggaagctgtactggtcagaccaaggaactgacagtggggttcctgccaagatcgccagtgctaacatggatggcacatctgtgaaaactctctttactgggaacctcgaacacctggagtgtgtcactcttgacatcgaagagcagaaactctactgggcagtcactggaagaggagtgattgaaagaggaaacgtggatggaacagatcggatgatcctggtacaccagctttcccacccctggggaattgcagtccatgattctttcctttattatactgatgaacagtatgaggtcattgaaagagttgataaggccactggggccaacaaaatagtcttgagagataatgttccaaatctgaggggtcttcaagtttatcacagacgcaatgccgccgaatcctcaaatggctgtagcaacaacatgaatgcctgtcagcagatttgcctgcctgtaccaggaggattgttttcctgcgcctgtgccactggatttaaactcaatcctgataatcggtcctgctctccatataactctttcattgttgtttcaatgctgtctgcaatcagaggctttagcttggaattgtcagatcattcagaaaccatggtgccggtggcaggccaaggacgaaacgcactgcatgtggatgtggatgtgtcctctggctttatttattggtgtgattttagcagctcagtggcatctgataatgcgatccgtagaattaaaccagatggatcttctctgatgaacattgtgacacatggaataggagaaaatggagtccggggtattgcagtggattgggtagcaggaaatctttatttcaccaatgcctttgtttctgaaacactgatagaagttctgcggatcaatactacttaccgccgtgttcttcttaaagtcacagtggacatgcctaggcatattgttgtagatcccaagaacagatacctcttctgggctgactatgggcagagaccaaagattgagcgttctttccttgactgtaccaatcgaacagtgcttgtgtcagagggcattgtcacaccacggggcttggcagtggaccgaagtgatggctacgtttattgggttgatgattctttagatataattgcaaggattcgtatcaatggagagaactctgaagtgattcgttatggcagtcgttacccaactccttatggcatcactgtttttgaaaattctatcatatgggtagataggaatttgaaaaagatcttccaagccagcaaggaaccagagaacacagagccacccacagtgataagagacaatatcaactggctaagagatgtgaccatctttgacaagcaagtccagccccggtcaccagcagaggtcaacaacaacccttgcttggaaaacaatggtgggtgctctcatctctgctttgctctgcctggattgcacaccccaaaatgtgactgtgcctttgggaccctgcaaagtgatggcaagaattgtgccatttcaacagaaaatttcctcatctttgccttgtctaattccttgagaagcttacacttggaccctgaaaaccatagcccacctttccaaacaataaatgtggaaagaactgtcatgtctctagactatgacagtgtaagtgatagaatctacttcacacaaaatttagcctctggagttggacagatttcctatgccaccctgtcttcagggatccatactccaactgtcattgcttcaggtatagggactgctgatggcattgcctttgactggattactagaagaatttattacagtgactacctcaaccagatgattaattccatggctgaagatgggtctaaccgcactgtgatagcccgcgttccaaaaccaagagcaattgtgttagatccctgccaagggtacctgtactgggctgactgggatacacatgccaaaatcgagagagccacattgggaggaaacttccgggtacccattgtgaacagcagtctggtcatgcccagtgggctgactctggactatgaagaggaccttctctactgggtggatgctagtctgcagaggattgaacgcagcactctgacgggcgtggatcgtgaagtcattgtcaatgcagccgttcatgcttttggcttgactctctatggccagtatatttactggactgacttgtacacacaaagaatttaccgagctaacaaatatgacgggtcaggtcagattgcaatgaccacaaatttgctctcccagcccaggggaatcaacactgttgtgaagaaccagaaacaacagtgtaacaatccttgtgaacagtttaatgggggctgcagccatatctgtgcaccaggtccaaatggtgccgagtgccagtgtccacatgagggcaactggtatttggccaacaacaggaagcactgcattgtggacaatggtgaacgatgtggtgcatcttccttcacctgctccaatgggcgctgcatctcggaagagtggaagtgtgataatgacaacgactgtggggatggcagtgatgagatggaaagtgtctgtgcacttcacacctgctcaccgacagccttcacctgtgccaatgggcgatgtgtccaatactcttaccgctgtgattactacaatgactgtggtgatggcagtgatgaggcagggtgcctgttcagggactgcaatgccaccacggagtttatgtgcaataacagaaggtgcatacctcgtgagtttatctgcaatggtgtagacaactgccatgataataacacttcagatgagaaaaattgccctgatcgcacttgccagtctggatacacaaaatgtcataattcaaatatttgtattcctcgcgtttatttgtgtgacggagacaatgactgtggagataacagtgatgaaaaccctacttattgcaccactcacacatgcagcagcagtgagttccaatgcgcatctgggcgctgtattcctcaacattggtattgtgatcaagaaacagattgttttgatgcctctgatgaacctgcctcttgtggtcactctgagcgaacatgcctagctgatgagttcaagtgtgatggtgggaggtgcatcccaagcgaatggatctgtgacggtgataatgactgtggggatatgagtgacgaggataaaaggcaccagtgtcagaatcaaaactgctcggattccgagtttctctgtgtaaatgacagacctccggacaggaggtgcattccccagtcttgggtctgtgatggcgatgtggattgtactgacggctacgatgagaatcagaattgcaccaggagaacttgctctgaaaatgaattcacctgtggttacggactgtgtatcccaaagatattcaggtgtgaccggcacaatgactgtggtgactatagcgacgagaggggctgcttataccagacttgccaacagaatcagtttacctgtcagaacgggcgctgcattagtaaaaccttcgtctgtgatgaggataatgactgtggagacggatctgatgagctgatgcacctgtgccacaccccagaacccacgtgtccacctcacgagttcaagtgtgacaatgggcgctgcatcgagatgatgaaactctgcaaccacctagatgactgtttggacaacagcgatgagaaaggctgtggcattaatgaatgccatgacccttcaatcagtggctgcgatcacaactgcacagacaccttaaccagtttctattgttcctgtcgtcctggttacaagctcatgtctgacaagcggacttgtgttgatattgatgaatgcacagagatgccttttgtctgtagccagaagtgtgagaatgtaataggctcctacatctgtaagtgtgccccaggctacctccgagaaccagatggaaagacctgccggcaaaacagtaacatcgaaccctatctcatttttagcaaccgttactatttgagaaatttaactatagatggctatttttactccctcatcttggaaggactggacaatgttgtggcattagattttgaccgagtagagaagagattgtattggattgatacacagaggcaagtcattgagagaatgtttctgaataagacaaacaaggagacaatcataaaccacagactaccagctgcagaaagtctggctgtagactgggtttccagaaagctctactggttggatgcccgcctggatggcctctttgtctctgacctcaatggtggacaccgccgcatgctggcccagcactgtgtggatgccaacaacaccttctgctttgataatcccagaggacttgcccttcaccctcaatatgggtacctctactgggcagactggggtcaccgcgcatacattgggagagtaggcatggatggaaccaacaagtctgtgataatctccaccaagttagagtggcctaatggcatcaccattgattacaccaatgatctactctactgggcagatgcccacctgggttacatagagtactctgatttggagggccaccatcgacacacggtgtatgatggggcactgcctcaccctttcgctattaccatttttgaagacactatttattggacagattggaatacaaggacagtggaaaagggaaacaaatatgatggatcaaatagacagacactggtgaacacaacacacagaccatttgacatccatgtgtaccatccatataggcagcccattgtgagcaatccctgtggtaccaacaatggtggctgttctcatctctgcctcatcaagccaggaggaaaagggttcacttgcgagtgtccagatgacttccgcacccttcaactgagtggcagcacctactgcatgcccatgtgctccagcacccagttcctgtgcgctaacaatgaaaagtgcattcctatctggtggaaatgtgatggacagaaagactgctcagatggctctgatgaactggccctttgcccgcagcgcttctgccgactgggacagttccagtgcagtgacggcaactgcaccagcccgcagactttatgcaatgctcaccaaaattgccctgatgggtctgatgaagaccgtcttctttgtgagaatcaccactgtgactccaatgaatggcagtgcgccaacaaacgttgcatcccagaatcctggcagtgtgacacatttaacgactgtgaggataactcagatgaagacagttcccactgtgccagcaggacctgccggccgggccagtttcggtgtgctaatggccgctgcatcccgcaggcctggaagtgtgatgtggataatgattgtggagaccactcggatgagcccattgaagaatgcatgagctctgcccatctctgtgacaacttcacagaattcagctgcaaaacaaattaccgctgcatcccaaagtgggccgtgtgcaatggtgtagatgactgcagggacaacagtgatgagcaaggctgtgaggagaggacatgccatcctgtgggggatttccgctgtaaaaatcaccactgcatccctcttcgttggcagtgtgatgggcaaaatgactgtggagataactcagatgaggaaaactgtgctccccgggagtgcacagagagcgagtttcgatgtgtcaatcagcagtgcattccctcgcgatggatctgtgaccattacaacgactgtggggacaactcagatgaacgggactgtgagatgaggacctgccatcctgaatattttcagtgtacaagtggacattgtgtacacagtgaactgaaatgcgatggatccgctgactgtttggatgcgtctgatgaagctgattgtcccacacgctttcctgatggtgcatactgccaggctactatgttcgaatgcaaaaaccatgtttgtatcccgccatattggaaatgtgatggcgatgatgactgtggcgatggttcagatgaagaacttcacctgtgcttggatgttccctgtaattcaccaaaccgtttccggtgtgacaacaatcgctgcatttatagtcatgaggtgtgcaatggtgtggatgactgtggagatggaactgatgagacagaggagcactgtagaaaaccgacccctaaaccttgtacagaatatgaatataagtgtggcaatgggcattgcattccacatgacaatgtgtgtgatgatgccgatgactgtggtgactggtccgatgaactgggttgcaataaaggaaaagaaagaacatgtgctgaaaatatatgcgagcaaaattgtacccaattaaatgaaggaggatttatctgctcctgtacagctgggttcgaaaccaatgtttttgacagaacctcctgtctagatatcaatgaatgtgaacaatttgggacttgtccccagcactgcagaaataccaaaggaagttatgagtgtgtctgtgctgatggcttcacgtctatgagtgaccgccctggaaaacgatgtgcagctgagggtagctctcctttgttgctactgcctgacaatgtccgaattcgaaaatataatctctcatctgagaggttctcagagtatcttcaagatgaggaatatatccaagctgttgattatgattgggatcccaaggacataggcctcagtgttgtgtattacactgtgcgaggggagggctctaggtttggtgctatcaaacgtgcctacatccccaactttgaatccggccgcaataatcttgtgcaggaagttgacctgaaactgaaatacgtaatgcagccagatggaatagcagtggactgggttggaaggcatatttactggtcagatgtcaagaataaacgcattgaggtggctaaacttgatggaaggtacagaaagtggctgatttccactgacctggaccaaccagctgctattgctgtgaatcccaaactagggcttatgttctggactgactggggaaaggaacctaaaatcgagtctgcctggatgaatggagaggaccgcaacatcctggttttcgaggaccttggttggccaactggcctttctatcgattatttgaacaatgaccgaatctactggagtgacttcaaggaggacgttattgaaaccataaaatatgatgggactgataggagagtcattgcaaaggaagcaatgaacccttacagcctggacatctttgaagaccagttatactggatatctaaggaaaagggagaagtatggaaacaaaataaatttgggcaaggaaagaaagagaaaacgctggtagtgaacccttggctcactcaagttcgaatctttcatcaactcagatacaataagtcagtgcccaacctttgcaaacagatctgcagccacctctgccttctgagacctggaggatacagctgtgcctgtccccaaggctccagctttatagaggggagcaccactgagtgtgatgcagccatcgaactgcctatcaacctgccccccccatgcaggtgcatgcacggaggaaattgctattttgatgagactgacctccccaaatgcaagtgtcctagcggctacaccggaaaatattgtgaaatggcgttttcaaaaggcatctctccaggaacaaccgcagtagctgtgctgttgacaatcctcttgatcgtcgtaattggagctctggcaattgcaggattcttccactatagaaggaccggctcccttttgcctgctctgcccaagctgccaagcttaagcagtctcgtcaagccctctgaaaatgggaatggggtgaccttcagatcaggggcagatcttaacatggatattggagtgtctggttttggacctgagactgctattgacaggtcaatggcaatgagtgaagactttgtcatggaaatggggaagcagcccataatatttgaaaacccaatgtactcagccagagacagtgctgtcaaagtggttcagccaatccaggtgactgtatctgaaaatgtggataataagaattatggaagtcccataaacccttctgagatagttccagagacaaacccaacttcaccagctgctgatggaactcaggtgacaaaatggaatctcttcaaacgaaaatctaaacaaactaccaactttgaaaatccaatctatgcacagatggagaacgagcaaaaggaaagtgttgctgcgacaccacctccatcaccttcgctccctgctaagcctaagcctccttcgagaagagacccaactccaacctattctgcaacagaagacacttttaaagacaccgcaaatcttgttaaagaagactctgaagtatagctataccagctatttagggaataattagaaacacacttttgcacatatattttttacaaacagatgaaaaaagttaacattcagtactttatgaaaaaaatatatttttccctgtttgcctataggtggaggtatcctgtgtgtctttttttacttatgccgtctcatatttttacaaataattatcacaatgtactatatgtatatctttgcactgaagttgtctgaaggtaatactataaatatattgtatatttgtaaattttggaaagattatcctgttactgaatttgctaataaagatgtctgctgaaaaaaaa

SEQ ID NO: 10522 - DNA, 14896 bp, Homo sapiens
  III.4150 (NM_002332)
cagcggtgcgagctccaggcccatgcactgaggaggcggaaacaaggggagcccccagagctccatcaagccccctccaaaggctcccctacccggtccacgccccccaccccccctccccgcctcctcccaattgtgcatttttgcagccggaggcggctccgagatggggctgtgagcttcgcccggggagggggaaagagcagcgaggagtgaagcgggggggtggggtgaagggtttggatttcggggcagggggcgcacccccgtcagcaggccctccccaaggggctcggaactctacctcttcacccacgcccctggtgcgctttgccgaaggaaagaataagaacagagaaggaggagggggaaaggaggaaaagggggaccccccaactggggggggtgaaggagagaagtagcaggaccagaggggaaggggctgctgcttgcatcagcccacaccatgctgaccccgccgttgctcctgctgctgcccctgctctcagctctggtcgcggcggctatcgacgcccctaagacttgcagccccaagcagtttgcctgcagagatcaaataacctgtatctcaaagggctggcggtgcgacggtgagagggactgcccagacggatctgacgaggcccctgagatttgtccacagagtaaggcccagcgatgccagccaaacgagcataactgcctgggtactgagctgtgtgttcccatgtcccgcctctgcaatggggtccaggactgcatggacggctcagatgaggggccccactgccgagagctccaaggcaactgctctcgcctgggctgccagcaccattgtgtccccacactcgatgggcccacctgctactgcaacagcagctttcagcttcaggcagatggcaagacctgcaaagattttgatgagtgctcagtgtacggcacctgcagccagctatgcaccaacacagacggctccttcatatgtggctgtgttgaaggatacctcctgcagccggataaccgctcctgcaaggccaagaacgagccagtagaccggccccctgtgctgttgatagccaactcccagaacatcttggccacgtacctgagtggggcccaggtgtctaccatcacacctacgagcacgcggcagaccacagccatggacttcagctatgccaacgagaccgtatgctgggtgcatgttggggacagtgctgctcagacgcagctcaagtgtgcccgcatgcctggcctaaagggcttcgtggatgagcacaccatcaacatctccctcagtctgcaccacgtggaacagatggccatcgactggctgacaggcaacttctactttgtggatgacatcgatgataggatctttgtctgcaacagaaatggggacacatgtgtcacattgctagacctggaactctacaaccccaagggcattgccctggaccctgccatggggaaggtgtttttcactgactatgggcagatcccaaaggtggaacgctgtgacatggatgggcagaaccgcaccaagctcgtcgacagcaagattgtgtttcctcatggcatcacgctggacctggtcagccgccttgtctactgggcagatgcctatctggactatattgaagtggtggactatgagggcaagggccgccagaccatcatccagggcatcctgattgagcacctgtacggcctgactgtgtttgagaattatctctatgccaccaactcggacaatgccaatgcccagcagaagacgagtgtgatccgtgtgaaccgctttaacagcaccgagtaccaggttgtcacccgggtggacaagggtggtgccctccacatctaccaccagaggcgtcagccccgagtgaggagccatgcctgtgaaaacgaccagtatgggaagccgggtggctgctctgacatctgcctgctggccaacagccacaaggcgcggacctgccgctgccgttccggcttcagcctgggcagtgacgggaagtcatgcaagaagccggagcatgagctgttcctcgtgtatggcaagggccggccaggcatcatccggggcatggatatgggggccaaggtcccggatgagcacatgatccccattgaaaacctcatgaacccccgagccctggacttccacgctgagaccggcttcatctactttgccgacaccaccagctacctcattggccgccagaagattgatggcactgagcgggagaccatcctgaaggacggcatccacaatgtggagggtgtggccgtggactggatgggagacaatctgtactggacggacgatgggcccaaaaagacaatcagcgtggccaggctggagaaagctgctcagacccgcaagactttaatcgagggcaaaatgacacaccccagggctattgtggtggatccactcaatgggtggatgtactggacagactgggaggaggaccccaaggacagtcggcgtgggcggctggagagggcgtggatggatggctcacaccgagacatctttgtcacctccaagacagtgctttggcccaatgggctaagcctggacatcccggctgggcgcctctactgggtggatgccttctacgaccgcatcgagacgatactgctcaatggcacagaccggaagattgtgtatgaaggtcctgagctgaaccacgcctttggcctgtgtcaccatggcaactacctcttctggactgagtatcggagtggcagtgtctaccgcttggaacggggtgtaggaggcgcaccccccactgtgacccttctgcgcagtgagcggccccccatctttgagatccgaatgtatgatgcccagcagcagcaagttggcaccaacaaatgccgggtgaacaatggcggctgcagcagcctgtgcttggccacccctgggagccgccagtgcgcctgtgctgaggaccaggtgttggacgcagacggcgtcacttgcttggcgaacccatcctacgtgcctccaccccagtgccagccaggcgagtttgcctgtgccaacagccgctgcatccaggagcgctggaagtgtgacggagacaacgattgcctggacaacagtgatgaggccccagccctctgccatcagcacacctgcccctcggaccgattcaagtgcgagaacaaccggtgcatccccaaccgctggctctgcgacggggacaatgactgtgggaacagtgaagatgagtccaatgccacttgttcagcccgcacctgcccccccaaccagttctcctgtgccagtggccgctgcatccccatctcctggacgtgtgatctggatgacgactgtggggaccgctctgatgagtctgcttcgtgtgcctatcccacctgcttccccctgactcagtttacctgcaacaatggcagatgtatcaacatcaactggagatgcgacaatgacaatgactgtggggacaacagtgacgaagccggctgcagccactcctgttctagcacccagttcaagtgcaacagcgggcgttgcatccccgagcactggacctgcgatggggacaatgactgcggagactacagtgatgagacacacgccaactgcaccaaccaggccacgaggccccctggtggctgccacactgatgagttccagtgccggctggatggactatgcatccccctgcggtggcgctgcgatggggacactgactgcatggactccagcgatgagaagagctgtgagggagtgacccacgtctgcgatcccagtgtcaagtttggctgcaaggactcagctcggtgcatcagcaaagcgtgggtgtgtgatggcgacaatgactgtgaggataactcggacgaggagaactgcgagtccctggcctgcaggccaccctcgcacccttgtgccaacaacacctcagtctgcctgccccctgacaagctgtgtgatggcaacgacgactgtggcgacggctcagatgagggcgagctctgcgaccagtgctctctgaataacggtggctgcagccacaactgctcagtggcacctggcgaaggcattgtgtgttcctgccctctgggcatggagctggggcccgacaaccacacctgccagatccagagctactgtgccaagcatctcaaatgcagccaaaagtgcgaccagaacaagttcagcgtgaagtgctcctgctacgagggctgggtcctggaacctgacggcgagagctgccgcagcctggaccccttcaagccgttcatcattttctccaaccgccatgaaatccggcgcatcgatcttcacaaaggagactacagcgtcctggtgcccggcctgcgcaacaccatcgccctggacttccacctcagccagagcgccctctactggaccgacgtggtggaggacaagatctaccgcgggaagctgctggacaacggagccctgactagtttcgaggtggtgattcagtatggcctggccacacccgagggcctggctgtagactggattgcaggcaacatctactgggtggagagtaacctggatcagatcgaggtggccaagctggatgggaccctccggaccaccctgctggccggtgacattgagcacccaagggcaatcgcactggatccccgggatgggatcctgttttggacagactgggatgccagcctgccccgcattgaggcagcctccatgagtggggctgggcgccgcaccgtgcaccgggagaccggctctgggggctggcccaacgggctcaccgtggactacctggagaagcgcatcctttggattgacgccaggtcagatgccatttactcagcccgttacgacggctctggccacatggaggtgcttcggggacacgagttcctgtcgcacccgtttgcagtgacgctgtacgggggggaggtctactggactgactggcgaacaaacacactggctaaggccaacaagtggaccggccacaatgtcaccgtggtacagaggaccaacacccagccctttgacctgcaggtgtaccacccctcccgccagcccatggctcccaatccctgtgaggccaatgggggccagggcccctgctcccacctgtgtctcatcaactacaaccggaccgtgtcctgcgcctgcccccacctcatgaagctccacaaggacaacaccacctgctatgagtttaagaagttcctgctgtacgcacgtcagatggagatccgaggtgtggacctggatgctccctactacaactacatcatctccttcacggtgcccgacatcgacaacgtcacagtgctagactacgatgcccgcgagcagcgtgtgtactggtctgacgtgcggacacaggccatcaagcgggccttcatcaacggcacaggcgtggagacagtcgtctctgcagacttgccaaatgcccacgggctggctgtggactgggtctcccgaaacctgttctggacaagctatgacaccaataagaagcagatcaatgtggcccggctggatggctccttcaagaacgcagtggtgcagggcctggagcagccccatggccttgtcgtccaccctctgcgtgggaagctctactggaccgatggtgacaacatcagcatggccaacatggatggcagcaatcgcaccctgctcttcagtggccagaagggccccgtgggcctggctattgacttccctgaaagcaaactctactggatcagctccgggaaccataccatcaaccgctgcaacctggatgggagtgggctggaggtcatcgatgccatgcggagccagctgggcaaggccaccgccctggccatcatgggggacaagctgtggtgggctgatcaggtgtcggaaaagatgggcacatgcagcaaggctgacggctcgggctccgtggtccttcggaacagcaccaccctggtgatgcacatgaaggtctatgacgagagcatccagctggaccataagggcaccaacccctgcagtgtcaacaacggtgactgctcccagctctgcctgcccacgtcagagacgacccgctcctgcatgtgcacagccggctatagcctccggagtggccagcaggcctgcgagggcgtaggttcctttctcctgtactctgtgcatgagggaatcaggggaattcccctggatcccaatgacaagtcagatgccctggtcccagtgtccgggacctcgctggctgtcggcatcgacttccacgctgaaaatgacaccatctactgggtggacatgggcctgagcacgatcagccgggccaagcgggaccagacgtggcgtgaagacgtggtgaccaatggcattggccgtgtggagggcattgcagtggactggatcgcaggcaacatctactggacagaccagggctttgatgtcatcgaggtcgcccggctcaatggctccttccgctacgtggtgatctcccagggtctagacaagccccgggccatcaccgtccacccggagaaagggtacttgttctggactgagtggggtcagtatccgcgtattgagcggtctcggctagatggcacggagcgtgtggtgctggtcaacgtcagcatcagctggcccaacggcatctcagtggactaccaggatgggaagctgtactggtgcgatgcacggacagacaagattgaacggatcgacctggagacaggtgagaaccgcgaggtggttctgtccagcaacaacatggacatgttttcagtgtctgtgtttgaggatttcatctactggagtgacaggactcatgccaacggctctatcaagcgcgggagcaaagacaatgccacagactccgtgcccctgcgaaccggcatcggcgtccagcttaaagacatcaaagtcttcaaccgggaccggcagaaaggcaccaacgtgtgcgcggtggccaatggcgggtgccagcagctgtgcctgtaccggggccgtgggcagcgggcctgcgcctgtgcccacgggatgctggctgaagacggagcatcgtgccgcgagtatgccggctacctgctctactcagagcgcaccattctcaagagtatccacctgtcggatgagcgcaacctcaatgcgcccgtgcagcccttcgaggaccctgagcacatgaagaacgtcatcgccctggcctttgactaccgggcaggcacctctccgggcacccccaatcgcatcttcttcagcgacatccactttgggaacatccaacagatcaacgacgatggctccaggaggatcaccattgtggaaaacgtgggctccgtggaaggcctggcctatcaccgtggctgggacactctctattggacaagctacacgacatccaccatcacgcgccacacagtggaccagacccgcccaggggccttcgagcgtgagaccgtcatcactatgtctggagatgaccacccacgggccttcgttttggacgagtgccagaacctcatgttctggaccaactggaatgagcagcatcccagcatcatgcgggcggcgctctcgggagccaatgtcctgacccttatcgagaaggacatccgtacccccaatggcctggccatcgaccaccgtgccgagaagctctacttctctgacgccaccctggacaagatcgagcggtgcgagtatgacggctcccaccgctatgtgatcctaaagtcagagcctgtccaccccttcgggctggccgtgtatggggagcacattttctggactgactgggtgcggcgggcagtgcagcgggccaacaagcacgtgggcagcaacatgaagctgctgcgcgtggacatcccccagcagcccatgggcatcatcgccgtggccaacgacaccaacagctgtgaactctctccatgccgaatcaacaacggtggctgccaggacctgtgtctgctcactcaccagggccatgtcaactgctcatgccgagggggccgaatcctccaggatgacctcacctgccgagcggtgaattcctcttgccgagcacaagatgagtttgagtgtgccaatggcgagtgcatcaacttcagcctgacctgcgacggcgtcccccactgcaaggacaagtccgatgagaagccatcctactgcaactcccgccgctgcaagaagactttccggcagtgcagcaatgggcgctgtgtgtccaacatgctgtggtgcaacggggccgacgactgtggggatggctctgacgagatcccttgcaacaagacagcctgtggtgtgggcgagttccgctgccgggacgggacctgcatcgggaactccagccgctgcaaccagtttgtggattgtgaggacgcctcagatgagatgaactgcagtgccaccgactgcagcagctacttccgcctgggcgtgaagggcgtgctcttccagccctgcgagcggacctcactctgctacgcacccagctgggtgtgtgatggcgccaatgactgtggggactacagtgatgagcgcgactgcccaggtgtgaaacgccccagatgccctctgaattacttcgcctgccctagtgggcgctgcatccccatgagctggacgtgtgacaaagaggatgactgtgaacatggcgaggacgagacccactgcaacaagttctgctcagaggcccagtttgagtgccagaaccatcgctgcatctccaagcagtggctgtgtgacggcagcgatgactgtggggatggctcagacgaggctgctcactgtgaaggcaagacgtgcggcccctcctccttctcctgccctggcacccacgtgtgcgtccccgagcgctggctctgtgacggtgacaaagactgtgctgatggtgcagacgagagcatcgcagctggttgcttgtacaacagcacttgtgacgaccgtgagttcatgtgccagaaccgccagtgcatccccaagcacttcgtgtgtgaccacgaccgtgactgtgcagatggctctgatgagtcccccgagtgtgagtacccgacctgcggccccagtgagttccgctgtgccaatgggcgctgtctgagctcccgccagtgggagtgtgatggcgagaatgactgccacgaccagagtgacgaggctcccaagaacccacactgcaccagcccagagcacaagtgcaatgcctcgtcacagttcctgtgcagcagtgggcgctgtgtggctgaggcactgctctgcaacggccaggatgactgtggcgacagctcggacgagcgtggctgccacatcaatgagtgtctcagccgcaagctcagtggctgcagccaggactgtgaggacctcaagatcggcttcaagtgccgctgtcgccctggcttccggctgaaggatgacggccggacgtgtgctgatgtggacgagtgcagcaccaccttcccctgcagccagcgctgcatcaacacccatggcagctataagtgtctgtgtgtggagggctatgcaccccgcggcggcgacccccacagctgcaaggctgtgactgacgaggaaccgtttctgatcttcgccaaccggtactacctgcgcaagctcaacctggacgggtccaactacacgttacttaagcagggcctgaacaacgccgttgccttggattttgactaccgagagcagatgatctactggacagatgtgaccacccagggcagcatgatccgaaggatgcaccttaacgggagcaatgtgcaggtcctacaccgtacaggcctcagcaaccccgatgggctggctgtggactgggtgggtggcaacctgtactggtgcgacaaaggccgggacaccatcgaggtgtccaagctcaatggggcctatcggacggtgctggtcagctctggcctccgtgagcccagggctctggtggtggatgtgcagaatgggtacctgtactggacagactggggtgaccattcactgatcggccgcatcggcatggatgggtccagccgcagcgtcatcgtggacaccaagatcacatggcccaatggcctgacgctggactatgtcactgagcgcatctactgggccgacgcccgcgaggactacattgaatttgccagcctggatggctccaatcgccacgttgtgctgagccaggacatcccgcacatctttgcactgaccctgtttgaggactacgtctactggaccgactgggaaacaaagtccattaaccgagcccacaagaccacgggcaccaacaaaacgctcctcatcagcacgctgcaccggcccatggacctgcatgtcttccatgccctgcgccagccagacgtgcccaatcacccctgcaaggtcaacaatggtggctgcagcaacctgtgcctgctgtcccccgggggagggcacaaatgtgcctgccccaccaacttctacctgggcagcgatgggcgcacctgtgtgtccaactgcacggctagccagtttgtatgcaagaacgacaagtgcatccccttctggtggaagtgtgacaccgaggacgactgcggggaccactcagacgagcccccggactgccctgagttcaagtgccggcccggacagttccagtgctccacaggtatctgcacaaaccctgccttcatctgcgatggcgacaatgactgccaggacaacagtgacgaggccaactgtgacatccacgtctgcttgcccagtcagttcaaatgcaccaacaccaaccgctgtattcccggcatcttccgctgcaatgggcaggacaactgcggagatggggaggatgagagggactgccccgaggtgacctgcgcccccaaccagttccagtgctccattaccaaacggtgcatcccccgggtctgggtctgcgaccgggacaatgactgtgtggatggcagtgatgagcccgccaactgcacccagatgacctgtggtgtggacgagttccgctgcaaggattcgggccgctgcatcccagcgcgttggaagtgtgacggagaggatgactgtggggatggctcggatgagcccaaggaagagtgtgatgaacgcacctgtgagccataccagttccgctgcaagaacaaccgctgcgtgcccggccgctggcagtgcgactacgacaacgattgcggtgacaactccgatgaagagagctgcacccctcggccctgctccgagagtgagttctcctgtgccaacggccgctgcatcgcggggcgctggaaatgcgatggagaccacgactgcgcggacggctcggacgagaaagactgcaccccccgctgtgacatggaccagttccagtgcaagagcggccactgcatccccctgcgctggcgctgtgacgcagacgccgactgcatggacggcagcgacgaggaggcctgcggcactggcgtgcggacctgccccctggacgagttccagtgcaacaacaccttgtgcaagccgctggcctggaagtgcgatggcgaggatgactgtggggacaactcagatgagaaccccgaggagtgtgcccggttcgtgtgccctcccaaccggcccttccgttgcaagaatgaccgcgtctgtctgtggatcgggcgccaatgcgatggcacggacaactgtggggatgggactgatgaagaggactgtgagccccccacagcccacaccacccactgcaaagacaagaaggagtttctgtgccggaaccagcgctgcctctcctcctccctgcgctgcaacatgttcgatgactgcggggacggctctgacgaggaggactgcagcatcgaccccaagctgaccagctgcgccaccaatgccagcatctgtggggacgaggcacgctgcgtgcgcaccgagaaagcggcctactgtgcctgccgctcgggcttccacaccgtgcccggccagcccggatgccaagacatcaacgagtgcctgcgcttcggcacctgctcccagctctgcaacaacaccaagggcggccacctctgcagctgcgctcggaacttcatgaagacgcacaacacctgcaaggccgaaggctctgagtaccaggtcctgtacatcgctgatgacaatgagatccgcagcctgttccccggccacccccattcggcttacgagcaggcattccagggtgacgagagtgtccgcattgatgctatggatgtccatgtcaaggctggccgtgtctattggaccaactggcacacgggcaccatctcctaccgcagcctgccacctgctgcgcctcctaccacttccaaccgccaccggcgacagattgaccggggtgtcacccacctcaacatttcagggctgaagatgcccagaggcatcgccatcgactgggtggccggaaacgtgtactggaccgactcgggccgagatgtgattgaggtggcgcagatgaagggcgagaaccgcaagacgctcatctcgggcatgattgacgagccccacgccattgtggtggacccactgagggggaccatgtactggtcagactggggcaaccaccccaagattgagacggcagcgatggatgggacgcttcgggagacactggtgcaggacaacattcagtggcccacaggcctggccgtggattatcacaatgagcggctgtactgggcagacgccaagctttcagtcatcggcagcatccggctcaatggcacggaccccattgtggctgctgacagcaaacgaggcctaagtcaccccttcagcatcgacgtctttgaggattacatctatggtgtcacctacatcaataatcgtgtcttcaagatccataagtttggccacagccccttggtcaacctgacagggggcctgagccacgcctctgacgtggtcctttaccatcagcacaagcagcccgaagtgaccaacccatgtgaccgcaagaaatgcgagtggctctgcctgctgagccccagtgggcctgtctgcacctgtcccaatgggaagcggctggacaacggcacatgcgtgcctgtgccctctccaacgccccccccagatgctccccggcctggaacctgtaacctgcagtgcttcaacggtggcagctgtttcctcaatgcacggaggcagcccaagtgccgctgccaaccccgctacacgggtgacaagtgtgaactggaccagtgctgggagcactgtcgcaatgggggcacctgtgctgcctccccctctggcatgcccacgtgccggtgccccacgggcttcacgggccccaaatgcacccagcaggtgtgtgcgggctactgtgccaacaacagcacctgcactgtcaaccagggcaaccagccccagtgccgatgcctacccggcttcctgggcgaccgctgccagtaccggcagtgctctggctactgtgagaactttggcacatgccagatggctgctgatggctcccgacaatgccgctgcactgcctactttgagggatcgaggtgtgaggtgaacaagtgcagccgctgtctcgaaggggcctgtgtggtcaacaagcagagtggggatgtcacctgcaactgcacggatggccgggtggcccccagctgtctgacctgcgtcggccactgcagcaatggcggctcctgtaccatgaacagcaaaatgatgcctgagtgccagtgcccaccccacatgacagggccccggtgtgaggagcacgtcttcagccagcagcagccaggacatatagcctccatcctaatccctctgctgttgctgctgctgctggttctggtggccggagtggtattctggtataagcggcgagtccaaggggctaagggcttccagcaccaacggatgaccaacggggccatgaacgtggagattggaaaccccacctacaagatgtacgaaggcggagagcctgatgatgtgggaggcctactggacgctgactttgccctggaccctgacaagcccaccaacttcaccaaccccgtgtatgccacactctacatggggggccatggcagtcgccactccctggccagcacggacgagaagcgagaactcctgggccggggccctgaggacgagataggggaccccttggcatagggccctgccccgtcggactgcccccagaaagcctcctgccccctgccggtgaagtccttcagtgagcccctccccagccagcccttccctggccccgccggatgtataaatgtaaaaatgaaggaattacattttatatgtgagcgagcaagccggcaagcgagcacagtattatttctccatcccctccctgcctgctccttggcacccccatgctgccttcagggagacaggcagggagggcttggggctgcacctcctaccctcccaccagaacgcaccccactgggagagctggtggtgcagccttcccctccctgtataagacactttgccaaggctctcccctctcgccccatccctgcttgcccgctcccacagcttcctgagggctaattctgggaagggagagttctttgctgcccctgtctggaagacgtggctctgggtgaggtaggcgggaaaggatggagtgttttagttcttgggggaggccaccccaaaccccagccccaactccaggggcacctatgagatggccatgctcaacccccctcccagacaggccctccctgtctccagggcccccaccgaggttcccagggctggagacttcctctggtaaacattcctccagcctcccctcccctggggacgccaaggaggtgggccacacccaggaagggaaagcgggcagccccgttttggggacgtgaacgttttaataatttttgctgaattctttacaactaaataacacagatattcttataaataaaattgtaaaaaaaaaaa

SEQ ID NO: 10523 - DNA, 16556 bp, Homo sapiens
  III.4151 (NM_018557)
  misc_feature (13999)..(13999): n is a, c, g, or t
  misc_feature (15128)..(15128): n is a, c, g, or t
aaagacagaaccccagagaaaaacgctgccaattcgttgctttattgttccctgcctggggacctcaatagccttttccattaaccttcccttcttacgcaacggttaatgacttttggggttgttttgctttctgtttctgctgagtcactaaattttgcctctttgtccccaggtgctgctcagcataaaagttaaaagtgcaattcaggaagtactgggattctgtgtagagccgaggaaaccatttccctaagagaagctctgttccttggcttgtccttccttcccgggaaggaagcttccgaggaacgaagggagaagctttgttttgcctgcagaagcagccctgtgctcggctgagggttctcagctggctgtgaactgcggagcattgtaggcgcctggctggctcaggccaatgcagaagtctctcccttctccaaagacccaaatccccacagaaccagcttcgagttactttcccttcaaggggattaaaataattgtgatttgtggcgctctccgttcgcggtggtattttcctgttgtgttaaatgcctcttattaagtaatagatgtgatttatgtgaacgacgaaggggtgtgtggtggattcggtgattaatcagtgaattcccatccgctggcatctctcactgcccctcttgcgtgatgtaagatcagacgtaccctgcattgaaaagtcaagacacacgggcgtctcgctcgcgctcacacacgctctgcctcctctctcccgcacgcgcgcatccctccaccttccacatcctgctccaggcaggagaaggctgactggctggactcattgagctgaagaatttccagtgacatttgtaaatgacgccgctcgattccaggctccaagcggccgctgccgccgccgccgccgccgggccgaaggtgccgccgagcagtctccagcgcaggcttccttaccgggcgaccacaatgtccgagtttctcctcgccttactcactctctcgggattattgccgattgccagggtgctgaccgtgggagccgaccgagatcagcagttgtgtgatcctggtgaatttctttgccacgatcacgtgacttgtgtctcccagagctggctgtgtgatggggaccctgactgccctgatgattcagacgagtctttagatacctgtcccgaggaggtagaaatcaagtgccccttgaatcacattgcttgccttggtaccaacaaatgtgttcatttatcccagctgtgcaatggtgtcttggactgcccagatgggtatgacgaaggagtacattgtcaggaactgttatccaattgccaacagctgaattgtcagtataaatgtacaatggtcagaaatagtacaagatgttactgtgaggatggattcgaaataacagaagatgggagaagctgtaaagatcaagatgaatgtgctgtttatggtacatgcagccagacctgcagaaacacacatggatcctacacttgcagttgtgtggaaggctacctaatgcagccagacaacagatcttgcaaggctaaaattgaacctacagatagaccacctatactattaattgcaaattttgaaacaattgaggttttctatcttaatggaagtaaaatggcaactctaagctcagtcaatggaaatgaaattcatactctggattttatttataatgaagatatgatttgttggattgaatcaagagaatcttcaaatcaactcaaatgtatccagataacaaaagcaggaggattaacagatgaatggacaatcaatattcttcaatccttccacaatgtgcaacaaatggcgattgactggctcactcgaaatctctattttgtggaccatgtcggtgaccggatctttgtttgtaattccaacggttctgtatgtgtcaccctgattgatctggagcttcacaatcctaaagcaatagcagtagatccaatagcaggaaaacttttctttactgactacgggaatgtcgccaaagtggagagatgtgacatggatgggatgaaccgaacaaggataattgattcaaagacagagcagccagctgcactggcactagacctagtcaacaaattggtttactgggtagatctttacttggactatgtgggagtagtggactatcaaggaaaaaatagacacactgtcattcaaggcagacaagtcagacatctttatggtataactgtgtttgaagattatttgtatgcaaccaattctgataactacaatatcgtaaggataaaccgatttaatgggactgatattcactcattaattaaaattgagaatgcttggggaatccgaatttatcaaaaaagaactcaaccaacagtcagaagccatgcatgtgaagtcgatccatatggaatgccagggggctgttcacacatctgtctactcagcagcagttacaaaactcggacttgtcgctgcaggactggcttcaacttgggaagtgatggcaggtcatgcaaaagaccaaagaatgagttgttcctcttttatgggaaaggacgcccaggaattgttagaggaatggacttgaataccaagatagctgatgaatacatgatccccatagaaaatctggtaaaccctcgtgctttagactttcacgcagaaaccaattacatctactttgctgacaccaccagtttcctaattggccggcagaagatagatggcacagagagagaaaccatcctgaaagatgatctggataatgtagagggcattgctgtggactggattggaaataatctttactggaccaatgatggccataggaaaaccattaatgtggccaggctggaaaaagcttctcagagtcggaagactcttttagagggtgaaatgtctcatcccagaggaattgtggtggatccagttaatggttggatgtattggacagactgggaggaagatgaaatagatgacagcgtgggaaggattgagaaggcctggatggatggattcaatcggcagatttttgtgacttcaaagatgctgtggccaaacggtttaactctggactttcacaccaacacattatactggtgtgatgcctattacgatcatattgaaaaagtatttttgaatgggactcacaggaagattgtttacagtgggagagagttgaaccaccctttcggactgtcgcatcatggaaattatgtgttctggactgattatatgaatggttccatttttcaactagatttgataacaagtgaggtgacattgctgaggcatgaaagaccacccctatttgggcttcagatttatgatccacgaaagcaacaaggtgacaatatgtgccgagtaaataatgggggctgtagtacactttgcttggctatcccaggaggccgggtgtgtgcttgtgccgataatcaacttttggatgaaaatgggacaacttgcacatttaatcctggagaagcactacctcacatatgtaaagctggagagtttcgctgcaaaaacagacactgtatccaagctcggtggaaatgtgatggcgacgatgactgcctagacggaagcgatgaggattcagtaaactgcttcaatcatagctgtcctgatgatcagtttaaatgccagaataatcgctgcatccccaagagatggctttgtgatggagctaatgactgtgggagcaatgaagatgaatccaatcaaacttgcacagccagaacatgccaggtagaccagttttcttgcggaaatgggcgttgcattcccagagcatggctgtgtgacagggaagacgactgtggtgaccagacagatgaaatggcatcttgtgaattcccaacttgtgagccactaacccaattcgtatgcaaaagtggaagatgcattagcagcaaatggcactgcgactctgatgacgactgtggggacgggagtgatgaggtgggctgtgttcactcttgctttgataatcagttcagatgttccagtggcagatgcatcccaggccactgggcctgtgatggtgacaatgactgtggggacttcagtgatgaagcccagatcaattgtactaaagaagagattcattctcctgctggttgtaacggaaatgaatttcagtgccaccctgatggtaattgcgttcctgatttgtggcgctgtgatggagaaaaagactgtgaagatggtagtgatgaaaaaggttgcaatggtaccatacgattgtgtgaccacaaaaccaagttttcctgttggagtacagggagatgcatcaacaaagcatgggtgtgtgatggagatattgattgcgaagatcagtcagatgaagatgactgtgacagtttcttgtgtggaccacccaagcatccttgtgctaatgacacctcagtctgcctgcagccagagaaactctgcaatgggaaaaaggattgtcctgatggctctgatgaaggctatctctgtgatgagtgttcgctgaacaatggaggctgtagcaaccactgttctgttgttcctggaagaggaattgtctgttcctgccctgaaggacttcaactcaacaaagacaataaaacatgtgaaattgtggattattgtagcaatcatctaaagtgcagccaagtatgtgagcagcacaagcacacagtcaagtgctcatgttatgaaggttggaagctggatgtagacggtgaaagttgtacaagtgttgatccttttgaagcattcatcatcttttctattcgtcatgagatcagaaggattgatcttcacaaaagagactatagtctacttgttcctggattgagaaacacaatagcacttgattttcacttcaatcaaagtttactttattggacagatgttgtagaagacagaatataccggggaaagctttctgaaagtggaggtgtcagtgccattgaagtggttgtggagcatggcctggctactccagaaggcctgacagtcgactggatagcaggaaacatatactggatagacagcaatctggaccaaatcgaagtggccaaactagatggctccctaagaactacactaatagcaggagccatggaacaccccagggccattgctttggacccaagatatggaattcttttctggacagactgggatgcaaattttcctcgcattgaatctgcctctatgagtggtgctgggagaaaaaccatctataaagacatgaaaactggggcttggcctaatggactaactgtggaccactttgagaaaaggatagtgtggacagacgccaggtcagatgctatttattcagccctctatgatggaacaaacatgatagaaatcatccgaggtcatgaatacctttcccatccctttgctgtgtctctatatgggagtgaagtctactggacagactggaggaccaacacattgtccaaagccaataagtggacagggcagaatgtcagtgtgattcagaaaaccagtgcacagccatttgaccttcagatataccatcccagtcgccagccacaggctcccaatccttgtgcagctaatgatggcaaaggcccctgctctcacatgtgtctaatcaatcacaataggagtgctgcctgtgcgtgcccccacttgatgaagctttcttcagacaagaagacctgctatgaaatgaaaaaatttcttctttatgcaagacgttctgaaatcagaggagtggatattgacaatccatactttaacttcatcacggcatttacagtccctgatattgatgacgttactgtgatagacttcgatgcatctgaggaacgtttatactggacagatattaaaacacaaaccattaaacgagcttttattaacggaactgggttagaaactgttatttcaagagatattcagagtatcagagggctagcagtggattgggtgtcacgtaatttatactggattagctcagaatttgatgaaacgcaaattaatgtggcaaggctagatggctctttgaaaacctcaattatccatggaatcgataagccacagtgtcttgcagctcacccagtcaggggaaaactctactggaccgatggaaacacaattaacatggcaaatatggatggcagtaatagcaagattctgtttcagaatcagaaggagccagttggtctatcgatagactatgtggaaaacaagctttattggatcagttcggggaatggaaccataaatagatgcaacctggatggtggtaatttagaagtaatcgagtcaatgaaagaagaattaacaaaagctacagccctaaccatcatggataagaaactgtggtgggcagaccaaaacttagcccagctaggaacctgcagcaaaagagacggaagaaaccccaccatcctacggaataagacttctggggtagttcatatgaaagtctatgataaagaagcacagcaaggcagcaattcctgccaactaaacaatggtggatgctctcaactttgtttaccaacatctgaaactacaaggacttgtatgtgtacagtgggatattatctccaaaagaaccgtatgtcatgtcaaggtatagaatcatttcttatgtactctgttcatgaaggaatcaggggaatacctcttgaaccaagtgacaaaatggatgctttgatgcctatatcaggaacttcatttgccgtgggaatagatttccatgcagaaaatgataccatctactggacagacatgggcttcaataaaattagcagagctaaaagagatcagacttggaaagaagatatcattaccaatggcttgggaagagtggaagggatagctgttgactggattgctggtaacatatattggacagatcatggtttcaacttaattgaagttgcaagactcaatggttctttccgttatgtaattatttcccaaggcctggatcaaccaagatctatagctgtgcacccagagaaaggcctcttgttctggactgaatggggacaaatgccctgtattggaaaggctcgcttggatggctcagagaaggttgtccttgtaagcatgggaatagcatggccgaatggcatctccatcgactatgaggaaaataaattgtactggtgtgatgctcgcacagacaagatagagagaatcgaccttgagactggagggaatcgcgagatggtgctgtcaggaagcaatgtggatatgttttcagttgcagtctttggggcttacatctactggtctgacagagcacatgcaaacgggtctgtcagaaggggccacaagaatgatgccacagaaacgataaccatgagaaccggccttggagtcaacctgaaggaggttaaaatatttaaccgagtaagagagaaagggaccaatgtttgtgccagggacaatggtggctgtaagcaactctgtctttatcgaggaaattcccggagaacttgtgcttgtgcccatggatatttggcagaagatggagttacttgcctgaggcatgaaggctatttactgtattcaggaagaacaatattaaaaagtatacatctttctgatgaaaccaatttaaattccccaataaggccatatgagaatccacgttatttcaagaatgtcatagccttggcttttgactataatcaaagaagaaaaggtaccaaccgaatcttttacagtgatgcacactttggaaatatacagcttattaaagacaactgggaagacagacaagtaattgttgaaaatgtgggttctgtggaaggacttgcctatcacagagcctgggatacactgtactggacaagctctaccacctcatccatcaccagacacactgtggaccagactcggcctggagcatttgacagggaagctgtcatcaccatgtcagaagatgaccatccacatgtgctagccttggatgaatgtcaaaatttaatgttttggaccaactggaatgaacaacatccaagtatcatgagatctactctgactgggaaaaatgctcaagtggtggtcagtacagacatactcactccaaatggacttactatcgactaccgtgcagagaagctgtatttctcagatggcagtctaggaaaaattgaaaggtgtgaatacgatggatcccagagacatgtgatagttaaatctgggccagggactttcctcagtttggctgtttatgacaattatatattctggtcggactggggaagaagagctatactgcggtccaacaagtacacaggaggagatacaaaaattcttcgttccgatattccacatcagccaatgggaatcatagctgttgccaatgacaccaatagctgtgaactttctccatgtgcattattgaatggaggctgccatgacttgtgccttttaactcccaatgggagagtgaattgttcctgcagaggggaccgaatattgctagaggacaacagatgtgtgactaaaaattcctcctgcaacgcttattcggagtttgaatgtggaaatggtgagtgcattgactaccagctcacctgtgatggcattcctcactgtaaagataaatcagatgaaaaactgctctactgtgaaaacagaagctgtcgaagaggcttcaagccatgctataatcgccgctgcattcctcatggcaagttatgtgatggagaaaatgactgcggagacaactctgatgaattagattgtaaagtttcaacctgtgccacggttgagttccgctgtgcagatgggacttgtattccaagatcagcacgatgcaaccagaacatagattgtgcagatgcttcagatgaaaagaactgcaataacacagactgcacacatttctataagcttggagtgaaaaccacagggttcataagatgtaattctacctcactgtgtgttctgccaacctggatatgcgacgggtctaatgactgtggagactattcagatgaattaaagtgcccagttcagaacaaacacaaatgtgaagaaaattattttagttgtcctagtggaagatgcattttgaatacctggatatgcgatggtcagaaagattgtgaggatggacgtgatgaattccactgtgattcttcttgctcttggaaccaatttgcttgttccgcacaaaaatgtatttctaagcattggatttgtgatggagaagatgactgtggggatgggttagatgaaagtgacagcatttgtggtgccataacctgtgctgctgacatgttcagctgccagggctctcgtgcctgcgtgccccgacattggctttgtgatggtgaaagggactgtccagatggaagcgatgagctttccacagcaggctgcgctcccaataatacatgtgatgaaaatgctttcatgtgccataataaagtatgcattcccaagcaatttgtttgtgaccatgatgacgactgtggagatggctctgatgagtcaccgcagtgtggataccgacagtgtggtacagaagaatttagttgtgctgatgggcggtgtcttctaaatactcaatggcagtgtgatggagactttgactgtcctgaccattctgatgaagcacctttaaacccaaagtgtaaaagtgcagaacagtcatgcaacagttcattttttatgtgcaaaaatggcaggtgcattcccagtggaggtctttgtgacaataaggatgactgtggcgatggttcagatgagagaaactgccatataaatgaatgtttgagtaagaaagtcagtggatgttctcaagattgtcaagaccttccggtcagttataagtgcaaatgctggcctggattccaactgaaggatgacggcaaaacatgtgtagacattgatgaatgctcttcaggctttccctgtagccagcaatgcatcaatacatacgggacttacaagtgcctctgtacagatgggtatgaaatacaacctgataacccaaatggctgcaaatcgctctcagatgaagaaccttttttaattcttgctgatcatcatgagataaggaaaattagcactgatggctccaactacacacttttaaaacagggattaaacaatgttattgctatagactttgattacagagaagaattcatctattggatcgattctagccgacccaatggcagtcgcataaatagaatgtgtttaaatggaagtgacattaaggtagttcataacacagcggtccccaatgcacttgctgtcgattggattggaaaaaacctctattggtctgacacagaaaaaagaatcattgaagtatccaaactcaatggcttgtaccctactatactcgttagcaaaaggctgaagtttcccagagacttgtctttagatcctcaagctggatatttgtattggattgactgctgcgagtatcctcatattggccgtgttggaatggatggaaccaatcagagtgttgtcatagaaaccaagatttctagacctatggcactaacaatagattatgttaatcgtagactctactgggccgatgaaaatcacattgaatttagcaacatggatggatctcatagacacaaagtccctaatcaagatattccaggggtgattgcactaacattgtttgaagactacatctactggactgatgggaaaaccaagtcactcagccgtgcccataaaacatcgggagcagacagactctcactgatttactcatggcatgccatcacagatatccaggtgtatcattcttatagacaacctgatgtctccaaacatctctgcatgataaataatggtggttgcagtcatttgtgccttttagcccctggaaaaacccacacttgtgcatgtcccactaacttctatctggcagctgataataggacttgcttatccaactgcacagccagccagtttcgttgcaaaactgacaaatgtattccattctggtggaaatgtgacaccgtggatgactgtggtgatggatctgatgaacctgatgactgtcctgaatttagatgtcagccaggccgatttcagtgtgggactggactctgtgctctaccagctttcatctgtgatggagagaatgattgtggagacaattctgatgaactcaactgtgacacacatgtctgcctgtcaggtcaattcaaatgtaccaagaaccagaaatgtatcccagtaaacttaagatgtaatgggcaagatgactgtggtgatgaggaagatgaaagagactgtcctgaaaacagctgttctccagactatttccagtgtaagactacgaagcattgcatttccaagctgtgggtttgtgacgaggatccagactgtgcagatgcatcagacgaggccaactgcgataaaaagacttgtggacctcatgaattccagtgtaaaaacaacaactgtattcccgatcactggcggtgtgatagccaaaatgactgcagtgataattcagatgaagaaaactgtaagccacagacatgtacattgaaagatttcctctgtgccaatggggactgtgtttcttcaaggttttggtgtgatggagattttgactgtgcagatggctctgatgagagaaattgtgagacaagttgttccaaagatcagttccggtgttccaatggtcagtgtataccagcaaaatggaaatgtgatggccatgaagactgcaaatatggggaagatgagaaaagctgtgagccagcttctcctacttgctcatcacgtgaatatatatgtgccagtgatggatgtatttcagcatctttgaaatgtaatggagaatatgattgtgctgatggttcagatgagatggactgtgtgactgaatgtaaggaagatcagtttcggtgcaaaaataaagcccactgtattccaattagatggctgtgtgatggaattcatgactgtgtggatggcagtgatgaagagaactgtgaaagaggaggaaatatatgtagagctgatgagttcctttgcaataattctctctgcaaactacatttctgggtgtgtgatggagaggacgactgtggagacaactctgatgaagcccctgatatgtgtgtcaaatttctttgtccatccacgagacctcacagatgcagaaataacagaatatgcctacagtcggagcaaatgtgcaatgggattgatgaatgcggtgacaattcagatgaagatcactgtggtggtaagctgacatataaagcaaggccttgtaaaaaggatgagtttgcttgtagtaataaaaaatgcatccctatggatctccagtgtgatcgacttgatgactgcggagatggttcagatgagcaaggatgcagaatagctcctactgaatatacctgtgaagataatgtgaatccatgtggagatgatgcatattgtaatcaaataaaaacatctgttttctgtcgctgtaagcctggatttcagagaaacatgaaaaacagacaatgtgaagaccttaatgaatgtttggtgtttggcacatgttcccatcaatgtataaatgtggaaggatcatataaatgtgtgtgtgaccagaattttcaagaaagaaataacacctgcatagcagaaggctctgaagatcaagttctctacattgctaatgacactgatatcctgggttttatatatccattcaactacagtggcgatcatcaacaaatttctcatattgaacataattcaagaataacagggatggatgtatattatcaaagagatatgattatttggagtactcagtttaatccaggcggaattttctacaaaaggatccatggcagagaaaaaaggcaagcaaacagtggcttgatttgtcctgaatttaaaaggcccagggacattgcagttgactgggtggctggaaacatttactggactgatcattctagaatgcattggttcagttactacactactcactggaccagtctgaggtactctatcaacgtagggcagctgaatggccccaactgcaccagactcttaacaaatatggctggagaaccctatgctattgcagtaaatcctaaaagagggatgatgtactggactgttgttggggatcattcccatatagaagaagcagccatggatggtacactgagaaggattttagtacaaaagaacttacagagacccacaggtttggctgtggattattttagtgaacgcatatattgggctgactttgagctctccatcattggcagtgttctgtatgatggctctaattcagtagtctctgtcagcagcaaacaaggtttattacatccacataggatcgatatctttgaagattatatatatggagcaggacctaaaaatggtgtatttcgagttcaaaaatttggccatggttcagtagagtacttagctttaaatattgataaaacaaaaggtgttttgatatctcatcgttataaacaactagatttacccaatccatgcttggatttagcatgcgaatttctttgcttgctaaatccttctggggccacttgtgtgtgtccagaaggaaaatatttgattaatggcacctgcaatgatgacagcctgttagatgattcatgtaagttaacttgtgaaaatggaggaagatgcattttaaatgagaaaggtgatttgaggtgtcactgttggcccagttattcaggagaaagatgtgaagtcaaccactgtagcaactactgccagaatggaggaacttgcgtaccatcagttctagggagacccacctgcagctgtgcactgggtttcactgggccaaactgtggtaagacagtctgtgaggatttttgtcaaaatggaggaacctgcattgtgactgctggaaaccagccttactgccactgccagccggaatacaccggagacagatgtcagtactacgtgtgccaccactattgtgtgaattctgaatcatgtaccattggggatgatggaagtnttgaatgtgtctgtccaacgcgctatgaaggaccaaaatgtgaggttgacaagtgtgtaaggtgccatggggggcactgcattataaataaagacagtgaagatatattttgcaactgcactaatggaaagattgcctctagctgtcagttatgtgatggctactgttacaatggtggcacatgccagctggaccccgagacaaatgtacctgtgtgtctatgctccaccaactggtcaggcacacagtgtgaaaggccagccccaaagagcagcaagtctgatcatatcagcacaagaagcattgccatcattgtgcctctcgtcctcttggtgactttgataaccaccttagtaattggtttagtgctttgtaaaagaaaaagaaggacaaaaacaattagaagacaacctattatcaatggaggaataaatgtagaaattggcaatccatcttataacatgtatgaggtagatcatgatcacaacgatggaggtcttttagatcctggctttatgatagacccaacaaaggccaggtacatagggggaggacccagtgctttcaagcttccacacacagcgccgcccatctacctaaactctgatttgaaaggaccactaactgctgggccaacaaattactccaatccggtatatgcaaaattatatatggatgggcaaaactgtcgaaactccttaggaagtgttgatgaaaggaaagaactgcttccaaagaaaatagaaattggtataagagagacagtggcataatcagtgatatcttttatatgctgtataaatgtataaaatataaggattacttttgtatgttccaacagtattatacttgttttggcatcagcattacctctttctttatctttttcctggttaattgttttctgagttttttgggttttattttttgctgatgactattgattgaccatttgtatggtatttttatgaaaaagaactgcactacagtacaatttacaacaatgctgctgatatgacacacctttgaatttgttaaaattaaaaacaacgtattcctttgtagtgtgaatatgagcaatctattttatatgaacttttttggttgtacttaatcaacgaggagaatntctgcacttttccattatacggtttgaaggctgtaatacagtgtcattttatttttctgtttaaattgatggaaaaatgattgaatggtcaactctcttctttgtgcccataaagatcgattcagactctgctgaaaatatatagctctcacaagttcagcatcacctgctttgaaattagccttagattgccaaccaatagatgagaattttgaggaaaaaaattaaaaatatgtaaaattaataatttgcatgaacacagatgactacattttccaaaacttagtggactctatgtgatgtactaaatgtatacaccttgtaagcaatagttatatttaggtggtagaacatagcaaaaatataaccgaaagttggccgactgcacttgctatggaataagaccttttattctccctcagtctcgagataaatagccagcctagagcacaacagggcattgggtacttgcatcttaggtatttcttcccagtcacatccattttgtggaagattaacccaaccccttacactacactgaacactaaagaataacatataagcacacaaattggtgacagaatttcaattacgtgaacgcatcctctttgctaggtcaaaaacaaagggcaaagcagacattttagtatacagagtgattggcaaatattttcaagatttaatatgagcaacccattatttgccctatccaaaatatattcaagggccttccaagttgtagaagaacaatgatcttcccataatcaaaagtggagagtcgaaatgctgtgccagttgctctggtattcaggtttctctgggttttacagaacgcatggaccccattcacgtttggtttgtttatcttcaaatttgagttgaaacgagtgcgatttatttaagttgtatataaaaataaaaggatagcatttttatacaaatatctttaaaggcacaaaagatttattcacaagttttggagggctttttgttcctctgatagacatgactgacttttagctgtcataatgtattaacctaacagatgaaatatgttaaatatgtggttgctctttatccctttgtacaagcattaaaaaaactgctgttttataagaagactttttgttgtactatgtgcatgcatactacctatttctaaactttgccatattgaggcctttataaactattgatttatgtaatactagtgcaattttgcttgaacaatgttatgcatatcataaactttttcaggttcttgtttaagtacattttttaaattgaacagtatttttcattttggttataatatagtcattttgcctatgtttctacaatgaagtgttaaatactttataaaaaattgttgactgacttatttaaatgaaattctacatataaaaaaaaaaaaaaaaaaaaaaaaaa

SEQ ID NO: 10524 - DNA, 1002 bp, Homo sapiens
  III.4152 (NM_002357)
cgccagagaggctccctcagccctgctccgcggggtccacagcgggctccacagcgggctccatagcgggctccacagcggtccggcggcggcagcgagcccgtgggcagtgggggttggtcccgtggctccggcccccggtgcagaatggcggcggcggttcggatgaacatccagatgctgctggaggcggccgactatctggagcggcgggagagagaagctgaacatggttatgcctccatgttaccatacaataacaaggacagagatgccttaaaacggaggaacaaatccaaaaagaataacagcagtagcagatcaactcacaatgaaatggagaagaatagacgggctcatcttcgcttgtgcctggagaagttgaaggggctggtgccactgggacccgaatcaagtcgacacactacgttgagtttattaacaaaagccaaattgcacataaagaaacttgaagattgtgacagaaaagccgttcaccaaatcgaccagcttcagcgagagcagcgacacctgaagaggcagctggagaagctgggcattgagaggatccggatggacagcatcggctccaccgtctcctcggagcgctccgactccgacagggaagaaatcgacgttgacgtggagagcacggactatctcacaggtgatctggactggagcagcagcagtgtgagcgactctgacgagcggggcagcatgcagagcctcggcagtgatgagggctattccagcaccagcatcaagagaataaagctgcaggacagtcacaaggcgtgtcttggtctctaagagagtgggcactgcggctgtctccttgaaggttctccctgttggttctgattaggtaacgtattggacctgcccacaactcccttgcacgtaaacttcagtgtcccaccttgaccaaaatcagctttgtaactgttttcaaggaggtgcttaggattgtgggtttctgattgcatcactagcttctcc

SEQ ID NO: 10525 - DNA, 1019 bp, Homo sapiens
  III.4153 (NM_012064)
catgggggtagcagggacccaggcactgtgaccatcccccctgccatgtgggaactgcgatcagcctccttttggagggccatattcgctgagttctttgccaccctcttctatgtcttctttgggctggggtcctcactgcgctgggctcctggacccctgcatgttctgcaggtggctatggcatttggcttggccctggctacactggtgcagtctgtgggccacatcagtggagcccacgtcaatcctgcagtcacttttgctttccttgtgggctcccagatgtccctgctccgtgccttctgctatatggcagcccagctcctgggagctgtggctggggccgctgtgctgtatagcgttaccccacctgctgtccgaggaaacctagcactcaacacgttgcaccctgcggtgagcgtgggccaggcaaccacagtggagatcttcctgacgctccagttcgtgctctgcatctttgccacatacgacgagaggcggaatggccaactgggctccgtggccctggccgttggcttctcccttgccctggggcacctctttgggatgtattatactggtgcaggcatgaatcctgcccgctcctttgctcctgccattctcactgggaacttcactaaccactgggtgtactgggtaggcccaatcattggagggggtctgggcagcctcctgtacgactttcttctcttcccccggctcaagagtatttctgagagactgtctgtcctcaagggtgccaaacccgatgtctccaatggacaaccagaggtcacaggggaacctgttgaactgaacacccaggccctgtagaagctccagctgaatagagggagtagaaagcttctgagtttacgtggaggggtttagccagcccctagatgaagaaagagactgtggggaggggcatgtacttctttattttttaacttatgtatgtggttgttttttttttttttttccttttgctgtgtgaaatctttcaagttgcattc

SEQ ID NO: 10526 - DNA, 367 bp, Homo sapiens
  III.4154 (NM_005951)
ctccagtctcacctcggcttgcaatggaccccaactgctcctgcgaggctggtggctcctgcgcctgcgccggctcctgcaagtgcaaaaagtgcaaatgcacctcctgcaagaagagctgctgctcctgttgccccctgggctgtgccaagtgtgcccagggctgcatctgcaaaggggcgtcagagaagtgcagctgctgtgcctgatgtcgggacagccctgctgtcagatgaaaacagaatgacacgtaaaatccgaggttttttttttctacaactccgactcatttgctacattcctttttttctgtgaaatatgtgaataataattaaacacttagacttgaaaaaaaaaaaaaaaaaaa

SEQ ID NO: 10527 - DNA, 722 bp, Homo sapiens
  III.4155 (NM_175617)
cttgttcgtctcactggtgtgagctccagcatcccctttgctcgaaatggaccccaactgctcttgcgccactggtggctcctgcacgtgcgccggctcctgcaagtgcaaagagtgcaaatgcacctcctgcaagaagagtgagtgcggggccatctccaggaatctggggctgtggctcaggttgggagggaactcaaggctggccctgagtgcatccttctggggaactgggctttctttgccctcattgcccgtgtcattccctctccaggctttctgccctaaattcagatggggcaggacagcatttttctcgtgggacacaaaccccaactgtaccccctatggtttcagaacagagctgtgccagacgaaaaaaagcatcctctgggtctgggttctgagctcgagccaggcttgctattagggcagggaggtgcccggtcaagtctactgccacctctcactctccccttcttccccaggctgctgttcctgctgccccgtgggctgtgccaagtgtgcccagggctgcgtctgcaaaggggcatcggagaagtgcagctgctgtgcctgatgtgggaacagctcttctcccagatgtaaatagaacaacctgcacaacctggatttttttaaaaatacaacactgagccatttgctgcatttctttttatactaaatatgtgactgacaataaaaacaattttgactttaaa

SEQ ID NO: 10528 - DNA, 404 bp, Homo sapiens
  III.4156 (NM_005947)
gcctgccctgacttctcatatcttgcctaggaactccaggcttgtcttggctccaaatggatcccaactgctcctgcaccacaggtggctcctgtgcctgcgccggctcctgcaagtgcaaagagtgcaaatgtacctcctgcaagaagtgctgctgctcttgctgccccgtgggctgtgccaagtgtgcccagggctgtgtctgcaaaggctcatcagagaagtgccgctgctgtgcctgatgttgggagagccctgctcccagacataaatagagcaaccagtactaacctggatttttttttttaactaccctgaccggtttgctacattcttttttctattcaatatgtgaaagacaataaaacacttttgacttgaaaaaaaaaaaaaaaaaaaaaaaa

SEQ ID NO: 10529 - DNA, 465 bp, Homo sapiens
  III.4157 (NM_005946)
aagccttccacgtgcgccttatagcctctcaacttcttgcttgggatctccaacctcaccgcggctcgaaatggaccccaactgctcctgcgccactggtggctcctgcacctgcactggctcctgcaaatgcaaagagtgcaaatgcaactcctgcaagaagagctgctgctcctgctgccccatgagctgtgccaagtgtgcccagggctgcatctgcaaaggggcatcagagaagtgcagctgctgtgcctgatgtccggacagccctgctcgaagatatagaaagagtgacctgcacaaacttggaattttttttccatacaaccctgacccatttactgtattttttttaatgaaatatgtgaatgataataaaagttgctgacttaaaaaaaaaaaaaaaaaaaaaaaaaaaaaaaaaaaaaaaaaaaaaaaaaaaaaaaaaaaaaaaaaaaaaaaaaa

SEQ ID NO: 10530 - DNA, 2154 bp, Homo sapiens
  III.4158 (NM_006636)
atataaccgcgtggcccgcgcgcgcgcttccctcccggcgcagtcaccggcgcggtctatggctgcgacttctctaatgtctgctttggctgcccggctgctgcagcccgcgcacagctgctcccttcgccttcgccctttccacctcgcggcagttcgaaatgaagctgttgtcatttctggaaggaaactggcccagcagatcaagcaggaagtgcggcaggaggtagaagagtgggtggcctcaggcaacaaacggccacacctgagtgtgatcctggttggcgagaatcctgcaagtcactcctatgtcctcaacaaaaccagggcagctgcagttgtgggaatcaacagtgagacaattatgaaaccagcttcaatttcagaggaagaattgttgaatttaatcaataaactgaataatgatgataatgtagatggcctccttgttcagttgcctcttccagagcatattgatgagagaaggatctgcaatgctgtttctccagacaaggatgttgatggctttcatgtaattaatgtaggacgaatgtgtttggatcagtattccatgttaccggctactccatggggtgtgtgggaaataatcaagcgaactggcattccaaccctagggaagaatgtggttgtggctggaaggtcaaaaaacgttggaatgcccattgcaatgttactgcacacagatggggcgcatgaacgtcccggaggtgatgccactgttacaatatctcatcgatatactcccaaagagcagttgaagaaacatacaattcttgcagatattgtaatatctgctgcaggtattccaaatctgatcacagcagatatgatcaaggaaggagcagcagtcattgatgtgggaataaatagagttcacgatcctgtaactgccaaacccaagttggttggagatgtggattttgaaggagtcagacaaaaagctgggtatatcactccagttcctggaggtgttggccccatgacagtggcaatgctaatgaagaataccattattgctgcaaaaaaggtgctgaggcttgaagagcgagaagtgctgaagtctaaagagcttggggtagccactaattaactactgtgtcttctgtgtcacaaacagcactccaggccagctcaagaagcaaagcaggccaatagaaatgcaatatttttaatttattctactgaaatggtttaaaatgatgccttgtatttattgaaagcttaaatgggtgggtgtttctgcacatacctctgcagtacctcaccagggagcattccagtatcatgcagggtcctgtgatctagccaggagcagccattaacctagtgattaatatgggagacattaccatatggaggatggatgcttcactttgtcaagcacctcagttacacattcgccttttctaggattgcatttcccaagtgctattgcaataacagttgatactcattttaggtaccagaccttttgagttcaactgatcaaaccaaaggaaaagtgttgctagagaaaattggggaaaaggtgaaaaagaaaaaatggtagtaattgagcagaaaaaaattaatttatatatgtattgattggcaaccagatttatctaagtagaactgaattggctaggaaaaaagaaaaactgcatgttaatcattttcctaagctgtccttttgaggcttagtcagtttattgggaaaatgtttaggattattccttgctattagtactcattttatgtatgttacccttcagtaagttctccccattttagttttctaggactgaaaggattcttttctacattatacatgtgtgttgtcatatttggcttttgctatatactttaacttcattgttaaatttttgtattgtatagtttctttggtgtatcttaaaacctatttttgaaaaacaaacttggcttgataatcatttgggcagcttgggtaagtacgcaacttacttttccaccaaagaactgtcagcagctgcctgcttttctgtgatgtatgtatcctgttgacttttccagaaattttttaagagtttgagttactattgaatttaatcagactttctgattaaagggttttctttcttttttaataaaacacatctgtctggtatggta

SEQ ID NO: 10531 - DNA, 3110 bp, Homo sapiens
  III.4159 (NM_005956)
gtggaacctcgatattggtggtgtccatcgtgggcagcggactaataaaggccatggcgccagcagaaatcctgaacgggaaggagatctccgcgcaaataagggcgagactgaaaaatcaagtcactcagttgaaggagcaagtacctggtttcacaccacgcctggcaatattacaggttggcaacagagatgattccaatctttatataaatgtgaagctgaaggctgctgaagagattgggatcaaagccactcacattaagttaccaagaacaaccacagaatctgaggtgatgaagtacattacatctttgaatgaagactctactgtacatgggttcttagtgcagctacctttagattcagagaattccattaacactgaagaagtgatcaatgctattgcacccgagaaggatgtggatggattgactagcatcaatgctgggagacttgctagaggtgacctcaatgactgtttcattccttgtacgcctaagggatgcttggaactcatcaaagagacaggggtgccgattgccggaaggcatgctgtggtggttgggcgcagtaaaatagttggggccccgatgcatgacttgcttctgtggaacaatgccacagtgaccacctgccactccaagactgcccatctggatgaggaggtaaataaaggtgacatcctggtggttgcaactggtcagcctgaaatggttaaaggggagtggatcaaacctggggcaatagtcatcgactgtggaatcaattatgtcccagatgataaaaaaccaaatgggagaaaagttgtgggtgatgtggcatacgacgaggccaaagagagggcgagcttcatcactcctgttcctggcggcgtagggcccatgacagttgcaatgctcatgcagagcacagtagagagtgccaagcgtttcctggagaaatttaagccaggaaagtggatgattcagtataacaaccttaacctcaagacacctgttccaagtgacattgatatatcacgatcttgtaaaccgaagcccattggtaagctggctcgagaaattggtctgctgtctgaagaggtagaattatatggtgaaacaaaggccaaagttctgctgtcagcactagaacgcctgaagcaccggcctgatgggaaatacgtggtggtgactggaataactccaacacccctgggagaagggaaaagcacaactacaatcgggctagtgcaagcccttggtgcccatctctaccagaatgtctttgcgtgtgtgcgacagccttctcagggccccacctttggaataaaaggtggcgctgcaggaggcggctactcccaggtcattcctatggaagagtttaatctccacctcacaggtgacatccatgccatcactgcagctaataacctcgttgctgcggccattgatgctcggatatttcatgaactgacccagacagacaaggctctctttaatcgtttggtgccatcagtaaatggagtgagaaggttctctgacatccaaatccgaaggttaaagagactaggcattgaaaagactgaccctaccacactgacagatgaagagataaacagatttgcaagattggacattgatccagaaaccataacttggcaaagagtgttggataccaatgatagattcctgaggaagatcacgattggacaggctccaacggagaagggtcacacacggacggcccagtttgatatctctgtggccagtgaaattatggctgtcctggctctcaccacttctctagaagacatgagagagagactgggcaaaatggtggtggcatccagtaagaaaggagagcccgtcagtgccgaagatctgggggtgagtggtgcactgacagtgcttatgaaggacgcaatcaagcccaatctcatgcagacactggagggcactccagtgtttgtccatgctggcccgtttgccaacatcgcacatggcaattcctccatcattgcagaccagatcgcactcaagcttgttggcccagaagggtttgtagtgacggaagcaggatttggagcagacattggaatggaaaagttttttaacatcaaatgccggtattccggcctctgcccccacgtggtggtgcttgttgccactgtcagggctctcaagatgcacgggggcggccccacggtcactgctggactgcctcttcccaaggcttacatacaggagaacctggagctggttgaaaaaggcttcagtaacttgaagaaacaaattgaaaatgccagaatgtttggaattccagtagtagtggccgtgaatgcattcaagacggatacagagtctgagctggacctcatcagccgcctttccagagaacatggggcttttgatgccgtgaagtgcactcactgggcagaagggggcaagggtgccttagccctggctcaggccgtccagagagcagcacaagcacccagcagcttccagctcctttatgacctcaagctcccagttgaggataaaatcaggatcattgcacagaagatctatggagcagatgacattgaattacttcccgaagctcaacacaaagctgaagtctacacgaagcagggctttgggaatctccccatctgcatggctaaaacacacttgtctttgtctcacaacccagagcaaaaaggtgtccctacaggcttcattctgcccattcgcgacatccgcgccagcgttggggctggttttctgtaccccttagtaggaacgatgagcacaatgcctggactccccacccggccctgtttttatgatattgatttggaccctgaaacagaacaggtgaatggattattctaaacagatcaccatccatcttcaagaagctactttgaaagtctggccagtgtctattcaggcccactgggagttaggaagtataagtaagccaagagaagtcagcccctgcccagaagatctgaaactaatagtaggagtttccccagaagtcattttcagccttaattctcatcatgtataaattaacataaatcatgcatgtctgtttactttagtgacgttccacagaataaaaggaaacaagtttgc

SEQ ID NO: 10532 - DNA, 3803 bp, Homo sapiens
  III.4160 (NM_000906)
ccatggtaggagcgctcgcctcgctgcggtgcccgctgaggccatgccggggccccggcgccccgctggctcccgcctgcgcctgctcctgctcctgctgctgccgccgctgctgctgctgctccggggcagccacgcgggcaacctgacggtagccgtggtactgccgctggccaatacctcgtacccctggtcgtgggcgcgcgtgggacccgccgtggagctggccctggcccaggtgaaggcgcgccccgacttgctgccgggctggacggtccgcacggtgctgggcagcagcgaaaacgcgctgggcgtctgctccgacaccgcagcgcccctggccgcggtggacctcaagtgggagcacaaccccgctgtgttcctgggccccggctgcgtgtacgccgccgccccagtggggcgcttcaccgcgcactggcgggtcccgctgctgaccgccggcgccccggcgctgggcttcggtgtcaaggacgagtatgcgctgaccacccgcgcggggcccagctacgccaagctgggggacttcgtggcggcgctgcaccgacggctgggctgggagcgccaagcgctcatgctctacgcctaccggccgggtgacgaagagcactgcttcttcctcgtggaggggctgttcatgcgggtccgcgaccgcctcaatattacggtggaccacctggagttcgccgaggacgacctcagccactacaccaggctgctgcggaccatgccgcgcaaaggccgagttatctacatctgcagctcccctgatgccttcagaaccctcatgctcctggccctggaagctggcttgtgtggggaggactacgttttcttccacctggatatctttgggcaaagcctgcaaggtggacagggccctgctccccgcaggccctgggagagaggggatgggcaggatgtcagtgcccgccaggcctttcaggctgccaaaatcattacatataaagacccagataatcccgagtacttggaattcctgaagcagttaaaacacctggcctatgagcagttcaacttcaccatggaggatggcctggtgaacaccatcccagcatccttccacgacgggctcctgctctatatccaggcagtgacggagactctggcacatgggggaactgttactgatggggagaacatcactcagcggatgtggaaccgaagctttcaaggtgtgacaggatacctgaaaattgatagcagtggcgatcgggaaacagacttctccctctgggatatggatcccgagaatggtgccttcagggttgtactgaactacaatgggacttcccaagagctggtggctgtgtcggggcgcaaactgaactggcccctggggtaccctcctcctgacatccccaaatgtggctttgacaacgaagacccagcatgcaaccaagatcacctttccaccctggaggtgctggctttggtgggcagcctctccttgctcggcattctgattgtctccttcttcatatacaggaagatgcagctggagaaggaactggcctcggagctgtggcgggtgcgctgggaggacgttgagcccagtagccttgagaggcacctgcggagtgcaggcagccggctgaccctgagcgggagaggctccaattacggctccctgctaaccacagagggccagttccaagtctttgccaagacagcatattataagggcaacctcgtggctgtgaaacgtgtgaaccgtaaacgcattgagctgacacgaaaagtcctgtttgaactgaagcatatgcgggatgtgcagaatgaacacctgaccaggtttgtgggagcctgcaccgacccccccaatatctgcatcctcacagagtactgtccccgtgggagcctgcaggacattctggagaatgagagcatcaccctggactggatgttccggtactcactcaccaatgacatcgtcaagggcatgctgtttctacacaatggggctatctgttcccatgggaacctcaagtcatccaactgcgtggtagatgggcgctttgtgctcaagatcaccgactatgggctggagagcttcagggacctggacccagagcaaggacacaccgtttatgccaaaaagctgtggacggcccctgagctcctgcgaatggcttcaccccctgtgcggggctcccaggctggtgacgtatacagctttgggatcatccttcaggagattgccctgaggagtggggtcttccacgtggaaggtttggacctgagccccaaagagatcatcgagcgggtgactcggggtgagcagccccccttccggccctccctggccctgcagagtcacctggaggagttggggctgctcatgcagcggtgctgggctgaggacccacaggagaggccaccattccagcagatccgcctgacgttgcgcaaatttaacagggagaacagcagcaacatcctggacaacctgctgtcccgcatggagcagtacgcgaacaatctggaggaactggtggaggagcggacccaggcatacctggaggagaagcgcaaggctgaggccctgctctaccagatcctgcctcactcagtggctgagcagctgaagcgtggggagacggtgcaggccgaagcctttgacagtgttaccatctacttcagtgacattgtgggtttcacagcgctgtcggcggagagcacacccatgcaggtggtgaccctgctcaatgacctgtacacttgctttgatgctgtcatagacaactttgatgtgtacaaggtggagacaattggcgatgcctacatggtggtgtcagggctccctgtgcggaacgggcggctacacgcctgcgaggtagcccgcatggccctggcactgctggatgctgtgcgctccttccgaatccgccaccggccccaggagcagctgcgcttgcgcattggcatccacacaggacctgtgtgtgctggagtggtgggactgaagatgccccgttactgtctctttggggatacagtcaacacagcctcaagaatggagtctaatggggaagccctgaagatccacttgtcttctgagaccaaggctgtcctggaggagtttggtggtttcgagctggagcttcgaggggatgtagaaatgaagggcaaaggcaaggttcggacctactggctccttggggagagggggagtagcacccgaggctgacctgcctcctctcctatccctccacacctcccctaccctgtgccagaagcaacagaggtgccaggcctcagcctcacccacagcagccccatcgccaaaggatggaagtaatttgaatagctcaggtgtgctgaccccagtgaagacaccagataggacctctgagaggggactggcatggggggatctcagagcttacaggctgagccaagcccacggccatgcacagggacactcacacaggcacacgcacctgctctccacctggactcaggccgggctgggctgtggatccttgatcccctcccctccccatgctctcctccctcagccttgctaccctgtgacttactgggaggagagtcacctgaaggggaacatgaaaagagactaggtgaagagagggcaggggagcccacatctggggctggcccacaatacctgctcccccgaccccctccacccagcagtagacacagtgcacaggggagaagaggggtggcgcagaagggttgggggcctgtatgccttgcttctaccatgagcagagacaattaaaatctttattccagtg

SEQ ID NO: 10533 - DNA, 3482 bp, Homo sapiens
  III.4161 (NM_000907)
atggcgctgccatcacttctgctgttggtggcagccctggcaggtggggtgcgtcctcccggggcgcggaacctgacgctggcggtggtgctgccagaacacaacctgagctatgcctgggcctggccacgggtgggacccgctgtggcactagctgtggaggctctgggccgggcactgcccgtggacctgcggtttgtcagctccgaactggaaggcgcctgctctgagtacctggcaccgctgagcgctgtggacctcaagctgtaccatgaccccgacctgctgttaggtcccggttgcgtgtaccctgctgcctctgtggcccgctttgcctcccactggcgccttcccctgctgactgcgggtgctgtggcctctggtttttcggctaagaatgaccattatcgtaccctggttcgcactggcccctctgctcccaagctgggtgagtttgtggtgacactacacgggcacttcaattggactgcccgtgctgccttgctgtacctggatgctcgcacagatgaccggcctcactacttcaccatcgagggcgtctttgaggccctgcagggcagcaacctcagtgtgcagcaccaggtgtatgcccgagagccagggggccccgagcaggccacccacttcatccgggccaacgggcgcattgtgtatatctgcggccctctggagatgctgcatgagatcctgcttcaggcccagagggagaatctgaccaatggggattatgtcttcttttacctggatgtctttggggagagtctccgtgcaggccccacacgtgctacaggccggccctggcaggacaatcgcacccgggaacaggcccaggccctcagagaggcctttcagactgtattggtgatcacgtaccgagaacccccaaatcctgagtatcaggaattccagaatcgtctgctgataagagcccgggaagactttggtgtggagctgggcccttccctgatgaacctcatcgctggctgcttctatgatgggatcctgctatatgctgaagtcctgaatgagacaatacaggaaggaggcacccgggaggatggacttcgaattgtggaaaagatgcagggacgaagatatcacggtgtaactgggctggttgtcatggacaagaacaatgaccgagagactgactttgtcctctgggccatgggagacctggattctggggactttcagcctgcagcccactactcgggagctgagaagcagatttggtggacgggacggcctattccctgggtgaagggggctcctccctcggacaatcccccctgtgcctttgacttggacgacccatcctgtgataaaactccactttcaaccctggcaattgtggctctgggcacaggaatcaccttcatcatgtttggtgtttccagcttcctaattttccgaaagctgatgctggagaaggagctggctagcatgttgtggcgtattcgctgggaagaactgcagtttggcaactcagagcgttatcacaaaggtgcaggcagtcgcctcacactgtcgctgcggggatccagttacggctcgctcatgacagcccatgggaaataccagatctttgccaacaccggtcacttcaagggaaatgttgtcgccatcaaacatgtgaataagaagcgcattgagctgacccggcaggttctgtttgaactcaaacatatgagagatgttcagttcaaccatctcactcgcttcattggcgcctgcatagaccctcccaacatttgcattgtcactgaatactgtcctcgtgggagtttacaggatattctagaaaatgacagcatcaacttggactggatgtttcgttattcactcattaatgaccttgttaagggcatggcctttctccacaacagcattatttcatcgcatgggagtctcaagtcctccaactgtgtggtggatagtcgttttgtgctcaaaatcacagactatggcctggccagcttccgatcaactgctgaacctgatgacagccatgccctctatgccaagaagctgtggactgccccagaactgctcagtgggaaccccttgccaaccacaggcatgcagaaggctgacgtctatagctttgggatcatcctgcaggagatagcacttcgcagtggtcctttctacttggagggcctggacctcagccccaaagagattgtccagaaggtacgaaatggtcagcggccatatttccggccaagcattgaccggacccaactgaatgaagagctagttttgctgatggagcgatgttgggctcaggacccagctgagcggccagactttggacagattaagggcttcattcggcgctttaacaaggagggtggcaccagcatattggacaacctcctgctgcgcatggaacagtatgccaataacttggagaagctggtggaggaacgcacacaggcctatctggaggaaaaacgcaaggctgaagctctgctctaccaaatcctaccccattcagtggcagagcagttaaaacggggagagactgtacaggctgaggcctttgacagtgttaccatctacttcagtgacattgttggcttcacagcattgtcagcagagagcacccccatgcaggtagtgacacttcttaatgacctgtatacctgctttgatgccataattgacaactttgatgtctacaaggtggagacgattggggatgcttacatggtggtatctggcctcccaggccgaaatggtcaacgccatgcaccagaaattgctcgtatggccctagcattactagatgcagtttcttcctttcgcatccgccaccgaccccatgaccagctgaggctacgcataggggtccatactggtaaggctgactctcactccagccctagtctccacctttcccagactctcccaacctgtttcttctcaaagggccagtctgtgctggggttgttggcctgaagatgccccgttattgtctttttggagacacagtgaacactgcttctcgaatggagtctaatggtcaagcgctgaagatccatgtctcctctaccaccaaggatgccctagatgagctaggatgcttccagctagagcttcggggggatgtggaaatgaagggaaaaggaaagatgcgaacatactggctcttaggagagcggaaaggacctcctggactcctgtaaacccccattctttccaagtcagatagtcttctgctgctggtacctgggtgggcaatggccaccatgtctgcacacaccagaaatggacattttcatatgcaatggaaaacagccacaaaaagacctaccttatatggaagttgtagccctctgcagctcagccctgtacatatacctgtccctctctggcttggtccccttcctccctactttctgtaaatatctgtatctaaaccagaatattttggtcaaatataaaacaataat

SEQ ID NO: 10534 - DNA, 3411 bp, Homo sapiens
  III.4162 (NM_003995)
atggcgctgccatcacttctgctgttggtggcagccctggcaggtggggtgcgtcctcccggggcgcggaacctgacgctggcggtggtgctgccagaacacaacctgagctatgcctgggcctggccacgggtgggacccgctgtggcactagctgtggaggctctgggccgggcactgcccgtggacctgcggtttgtcagctccgaactggaaggcgcctgctctgagtacctggcaccgctgagcgctgtggacctcaagctgtaccatgaccccgacctgctgttaggtcccggttgcgtgtaccctgctgcctctgtggcccgctttgcctcccactggcgccttcccctgctgactgcgggtgctgtggcctctggtttttcggctaagaatgaccattatcgtaccctggttcgcactggcccctctgctcccaagctgggtgagtttgtggtgacactacacgggcacttcaattggactgcccgtgctgccttgctgtacctggatgctcgcacagatgaccggcctcactacttcaccatcgagggcgtctttgaggccctgcagggcagcaacctcagtgtgcagcaccaggtgtatgcccgagagccagggggccccgagcaggccacccacttcatccgggccaacgggcgcattgtgtatatctgcggccctctggagatgctgcatgagatcctgcttcaggcccagagggagaatctgaccaatggggattatgtcttcttttacctggatgtctttggggagagtctccgtgcaggccccacacgtgctacaggccggccctggcaggacaatcgcacccgggaacaggcccaggccctcagagaggcctttcagactgtattggtgatcacgtaccgagaacccccaaatcctgagtatcaggaattccagaatcgtctgctgataagagcccgggaagactttggtgtggagctgggcccttccctgatgaacctcatcgctggctgcttctatgatgggatcctgctatatgctgaagtcctgaatgagacaatacaggaaggaggcacccgggaggatggacttcgaattgtggaaaagatgcagggacgaagatatcacggtgtaactgggctggttgtcatggacaagaacaatgaccgagagactgactttgtcctctgggccatgggagacctggattctggggactttcagcctgcagcccactactcgggagctgagaagcagatttggtggacgggacggcctattccctgggtgaagggggctcctccctcggacaatcccccctgtgcctttgacttggacgacccatcctgtgataaaactccactttcaaccctggcaattgtggctctgggcacaggaatcaccttcatcatgtttggtgtttccagcttcctaattttccgaaagctgatgctggagaaggagctggctagcatgttgtggcgtattcgctgggaagaactgcagtttggcaactcagagcgttatcacaaaggtgcaggcagtcgcctcacactgtcgctgcggggatccagttacggctcgctcatgacagcccatgggaaataccagatctttgccaacaccggtcacttcaagggaaatgttgtcgccatcaaacatgtgaataagaagcgcattgagctgacccggcaggttctgtttgaactcaaacatatgagagatgttcagttcaaccatctcactcgcttcattggcgcctgcatagaccctcccaacatttgcattgtcactgaatactgtcctcgtgggagtttacaggatattctagaaaatgacagcatcaacttggactggatgtttcgttattcactcattaatgaccttgttaagggcatggcctttctccacaacagcattatttcatcgcatgggagtctcaagtcctccaactgtgtggtggatagtcgttttgtgctcaaaatcacagactatggcctggccagcttccgatcaactgctgaacctgatgacagccatgccctctatgccaagaagctgtggactgccccagaactgctcagtgggaaccccttgccaaccacaggcatgcagaaggctgacgtctatagctttgggatcatcctgcaggagatagcacttcgcagtggtcctttctacttggagggcctggacctcagccccaaagagattgtccagaaggtacgaaatggtcagcggccatatttccggccaagcattgaccggacccaactgaatgaagagctagttttgctgatggagcgatgttgggctcaggacccagctgagcggccagactttggacagattaagggcttcattcggcgctttaacaaggagggtggcaccagcatattggacaacctcctgctgcgcatggaacagtatgccaataacttggagaagctggtggaggaacgcacacaggcctatctggaggaaaaacgcaaggctgaagctctgctctaccaaatcctaccccattcagtggcagagcagttaaaacggggagagactgtacaggctgaggcctttgacagtgttaccatctacttcagtgacattgttggcttcacagcattgtcagcagagagcacccccatgcaggtagtgacacttcttaatgacctgtatacctgctttgatgccataattgacaactttgatgtctacaaggtggagacgattggggatgcttacatggtggtatctggcctcccaggccgaaatggtcaacgccatgcaccagaaattgctcgtatggccctagcattactagatgcagtttcttcctttcgcatccgccaccgaccccatgaccagctgaggctacgcataggggtccatactgggccagtctgtgctggggttgttggcctgaagatgccccgttattgtctttttggagacacagtgaacactgcttctcgaatggagtctaatggtcaagcgctgaagatccatgtctcctctaccaccaaggatgccctagatgagctaggatgcttccagctagagcttcggggggatgtggaaatgaagggaaaaggaaagatgcgaacatactggctcttaggagagcggaaaggacctcctggactcctgtaaacccccattctttccaagtcagatagtcttctgctgctggtacctgggtgggcaatggccaccatgtctgcacacaccagaaatggacattttcatatgcaatggaaaacagccacaaaaagacctaccttatatggaagttgtagccctctgcagctcagccctgtacatatacctgtccctctctggcttggtccccttcctccctactttctgtaaatatctgtatctaaaccagaatattttggtcaaatataaaacaataat

SEQ ID NO: 10535 - DNA, 1752 bp, Homo sapiens
  III.4163 (NM_000908)
ggggggcagagggcgagtcggcggcggcgagggcaagctctttcttgcggcacgatgccgtctctgctggtgctcactttctccccgtgcgtactactcggctgggcgttgctggccggcggcaccggtggcggtggcgttggcggcggcggcggtggcgcgggcataggcggcggacgccaggagagagaggcgctgccgccacagaagatcgaggtgctggtgttactgccccaggatgactcgtacttgttttcactcacccgggtgcggccggccatcgagtatgctctgcgcagcgtggagggcaacgggactgggaggcggcttctgccgccgggcactcgcttccaggtggcttacgaggattcagactgtgggaaccgtgcgctcttcagcttggtggaccgcgtggcggcggcgcggggcgccaagccagaccttatcctggggccagtgtgcgagtatgcagcagcgccagtggcccggcttgcatcgcactgggacctgcccatgctgtcggctggggcgctggccgctggcttccagcacaaggactctgagtactcgcacctcacgcgcgtggcgcccgcctacgccaagatgggcgagatgatgctcgccctgttccgccaccaccactggagccgcgctgcactggtctacagcgacgacaagctggagcggaactgctacttcaccctcgagggggtccacgaggtcttccaggaggagggtttgcacacgtccatctacagtttcgacgagaccaaagacttggatctggaagacatcgtgcgcaatatccaggccagtgagagagtggtgatcatgtgtgcgagcagtgacaccatccggagcatcatgctggtggcgcacaggcatggcatgaccagtggagactacgccttcttcaacattgagctcttcaacagctcttcctatggagatggctcatggaagagaggagacaaacacgactttgaagctaagcaagcatactcgtccctccagacagtcactctactgaggacagtgaaacctgagtttgagaagttttccatggaggtgaaaagttcagttgagaaacaagggctcaatatggaggattacgttaacatgtttgttgaaggattccacgatgccatcctcctctacgtcttggctctacatgaagtactcagagctggttacagcaaaaaggatggagggaaaattatacagcagacttggaacagaacatttgaaggtatcgccgggcaggtgtccatagatgccaacggagaccgatatggggatttctctgtgattgccatgactgatgtggaggcgggcacccaggaggttattggtgattattttggaaaagaaggtcgttttgaaatgcggccgaatgtcaaatatccttggggccctttaaaactgagaatagatgaaaaccgaattgtagagcatacaaacagctctccctgcaaatcatgtggcctagaagaatcggcagtgacaggaattgtcgtgggggctttactaggagctggcttgctaatggccttctactttttcaggaagaaatacagaataaccattgagaggcgaacccagcaagaagaaagtaaccttggaaaacatcgggaattacgggaagattccatcagatcccatttttcagtagcttaaaggaagccccccacttttttttttctgcctgagattctttaaggagatagacgggttgaaagacatcaatgaaac

SEQ ID NO: 10536 - DNA, 2767 bp, Homo sapiens
  III.4164 (NM_002778)
gggcgggcgcattgcagactgcggagtcagacggtgctatgtacgccctcttcctcctggccagcctcctgggcgcggctctagccggcccggtccttggactgaaagaatgcaccaggggctcggcagtgtggtgccagaatgtgaagacggcgtccgactgcggggcagtgaagcactgcctgcagaccgtttggaacaagccaacagtgaaatcccttccctgcgacatatgcaaagacgttgtcaccgcagctggtgatatgctgaaggacaatgccactgaggaggagatccttgtttacttggagaagacctgtgactggcttccgaaaccgaacatgtctgcttcatgcaaggagatagtggactcctacctccctgtcatcctggacatcattaaaggagaaatgagccgtcctggggaggtgtgctctgctctcaacctctgcgagtctctccagaagcacctagcagagctgaatcaccagaagcagctggagtccaataagatcccagagctggacatgactgaggtggtggcccccttcatggccaacatccctctcctcctctaccctcaggacggcccccgcagcaagccccagccaaaggataatggggacgtttgccaggactgcattcagatggtgactgacatccagactgctgtacggaccaactccacctttgtccaggccttggtggaacatgtcaaggaggagtgtgaccgcctgggccctggcatggccgacatatgcaagaactatatcagccagtattctgaaattgctatccagatgatgatgcacatgcaacccaaggagatctgtgcgctggttgggttctgtgatgaggtgaaagagatgcccatgcagactctggtccccgccaaagtggcctccaagaatgtcatccctgccctggaactggtggagcccattaagaagcacgaggtcccagcaaagtctgatgtttactgtgaggtgtgtgaattcctggtgaaggaggtgaccaagctgattgacaacaacaagactgagaaagaaatactcgacgcttttgacaaaatgtgctcgaagctgccgaagtccctgtcggaagagtgccaggaggtggtggacacgtacggcagctccatcctgtccatcctgctggaggaggtcagccctgagctggtgtgcagcatgctgcacctctgctctggcacgcggctgcctgcactgaccgttcacgtgactcagccaaaggacggtggcttctgcgaagtgtgcaagaagctggtgggttatttggatcgcaacctggagaaaaacagcaccaagcaggagatcctggctgctcttgagaaaggctgcagcttcctgccagacccttaccagaagcagtgtgatcagtttgtggcagagtacgagcccgtgctgatcgagatcctggtggaggtgatggatccttccttcgtgtgcttgaaaattggagcctgcccctcggcccataagcccttgttgggaactgagaagtgtatatggggcccaagctactggtgccagaacacagagacagcagcccagtgcaatgctgtcgagcattgcaaacgccatgtgtggaactaggaggaggaatattccatcttggcagaaaccacagcattggtttttttctacttgtgtgtctgggggaatgaacgcacagatctgtttgactttgttataaaaatagggctcccccacctcccccatttctgtgtcctttattgtagcattgctgtctgcaagggagcccctagcccctagcccctggcagacatagctgcttcagtgccccttttctctctgctagatggatgttgatgcactggaggtcttttagcctgcccttgcatggcgcctgctggaggaggagagagctctgctggcatgagccacagtttcttgactggaggccatcaaccctcttggttgaggccttgttctgagccctgacatgtgcttgggcactggtgggcctgggcttctgaggtggcctcctgccctgatcagggaccctccccgctttcctgggcctctcagttgaacaaagcagcaaaacaaaggcagttttatatgaaagattagaagcctggaataatcaggctttttaaatgatgtaattcccactgtaatagcatagggattttggaagcagctgctggtggcttgggacatcagtggggccaagggttctctgtccctggttcaactgtgatttggctttcccgtgtctttcctggtgatgccttgtttggggttctgtgggtttgggtgggaagagggccatctgcctgaatgtaacctgctagctctccgaagccctgcgggcctggcttgtgtgagcgtgtggacagtggtggccgcgctgtgcctgctcgtgttgcctacatgtccctggctgttgaggcgctgcttcagcctgcacccctcccttgtctcatagatgctccttttgaccttttcaaataaatatggatggcgagctcctaggcctctggcttcctggtagagggcggcatgccgaagggtctgtctgggtgtggattggatgctgggggtgtgggggttggaagctgtctgtggcccacttgggcacccacgcttctgtccacttctggttgccaggagacagcaagcaaagccagcaggacatgaagttgctattaaatggacttcgtgatttttgttttgcactaaagtttctgtgatttaacaataaaattctgttagcccccccg

SEQ ID NO: 10537 - DNA, 5329 bp, Homo sapiens
  III.4165 (NM_005063)
  misc_feature (1986)..(1986): n is a, c, g, or t
gtggtgtcggtgtcggcagcatccccggcgccctgctgcggtcgccggagccctcggcctctgttctcctccccctcccgcccttacctccacgcgggaccgcccgcgccagtcaactcctcgcactttgcccctgcttggcagcggataaaagggggctgaggaaataccggacacgtccacccgttgccagctctagcctttaaattcccggctcgggacctccacgcaccgggctagcgccgacaaccagctagcgtgcaaggcgccgcggctcagcgcgtaccggcgggcttcgaaaccgcagtcctccggcgaccccgaactccgctccggagcctcagccccctggaaagtgatcccggcatcggagagccaagatgccggcccacttgctgcaggacgatatctctagctcctataccaccaccaccaccattacagcgcctccctccagggtcctgcagaatggaggagataagttggagacgatgcccctctacttggaagacgacattcgccctgatataaaagatgatatatatgaccccacctacaaggataaggaaggcccaagccccaaggttgaatatgtctggagaaacatcatccttatgtctctgctacacttgggagccctgtatgggatcactttgattcctacctgcaagttctacacctggctttggggggtattctactattttgtcagtgccctgggcataacagcaggagctcatcgtctgtggagccaccgctcttacaaagctcggctgcccctacggctctttctgatcattgccaacacaatggcattccagaatgatgtctatgaatgggctcgtgaccaccgtgcccaccacaagttttcagaaacacatgctgatcctcataattcccgacgtggctttttcttctctcacgtgggttggctgcttgtgcgcaaacacccagctgtcaaagagaaggggagtacgctagacttgtctgacctagaagctgagaaactggtgatgttccagaggaggtactacaaacctggcttgctgctgatgtgcttcatcctgcccacgcttgtgccctggtatttctggggtgaaacttttcaaaacagtgtgttcgttgccactttcttgcgatatgctgtggtgcttaatgccacctggctggtgaacagtgctgcccacctcttcggatatcgtccttatgacaagaacattagcccccgggagaatatcctggtttcacttggagctgtgggtgagggcttccacaactaccaccactcctttccctatgactactctgccagtgagtaccgctggcacatcaacttcaccacattcttcattgattgcatggccgccctcggtctggcctatgaccggaagaaagtctccaaggccgccatcttggccaggattaaaagaaccggagatggaaactacaagagtggctgagtttggggtccctcaggttcctttttcaaaaaccagccaggcagaggttttaatgtctgtttattaactactgaataatgctaccaggatgctaaagatgatgatgttaacccattccagtacagtattcttttaaaattcaaaagtattgaaagccaacaactctgcctttatgatgctaagctgatattatttcttctcttatcctctctctcttctaggcccattgtcctccttttcactttaatcgccctcctttcccttattgcctcccaggcaagcagctggtcagtctttgctcagtgtccagcttccaaagcctagacaacctttctgtagcctaaaacgaatggtctttgctccagataactctctttccttgagctgttgtgagctttgaagtaggtggcttgagctagagataaaacagaatcttctgggtagtcccctgttgattatcttcagcccaggcttttgctagatggaatggaaaagcaacttcatttgacacaaagcttctaaagcnaggtaaattgtcgggggagagagttagcatgtatgaatgtaaggatgagggaagcgaaggaacctctcgccatgatcagacatacagctgcctacctaatgaggacttcaagccccaccacatagcatgcttcctttctctcctggctcggggtaaaaagtggctgcggtgtttggcaatgctaattcaatgccgcaacatatagttgaggccgaggataaagaaaagacattttaagtttgtagtaaaagtggtctctgctggggaagggttttcttttctttttttctttaataacaaggagatttcttagttcatatatcaagaagtcttgaagttgggtgtttccagaattggtaaaaacagcagctcatagaattttgagtattccatgagctgctcattacagttctttcctctttctgctctgccatcttcaggatattggttcttcccctcatagtaataagatggctgtggcatttccaaacatccaaaaaaagggaaggatttaaggaggtgaagtcgggtcaaaaataaaatatatatacatatatacattgcttagaacgttaaactattagagtatttcccttccaaagagggatgtttggaaaaaactctgaaggagaggaggaattagttgggatgccaatttcctctccactgctggacatgagatggagaggctgagggacaggatctataggcagcttctaagagcgaacttcacataggaagggatctgagaacacgttcaggggttgagaaggttactgagtgagttattgggagtcttaataaactagatattaggtccattcattaattagttccagtttctccttgaaatgagtaaaaactagaaggcttctctccacagtgttgtgccccttcactcatttttttttgaggagaagggggtctctgttaacatctagcctaaagtatacaaactgcctggggggcagggttaggaatctcttcactaccctgattcttgattcctggctctaccctgtctgtcccttttctttgaccagatctttctcttccctgaacgttttcttctttccctggacaggcagcctcctttgtgtgtattcagaggcagtgatgacttgctgtccaggcagctccctcctgcacacagaatgctcagggtcactgaaccactgcttctcttttgaaagtagagctagctgccactttcacgtggcctccgcagtgtctccacctacacccctgtgctcccctgccacactgatggctcaagacaaggctggcaaaccctcccagaaacatctctggcccagaaagcctctctctccctccctctctcatgagaagccaagcgctcatgttgagccagtgggccagccacagagcaaaagagggtttattttcagtcccctctctctgggtcagaaccagagggcatgctgaatgccccctgcttacttggtgagggtgccccgcctgagtcagtgctctcagctggcagtgcaatgcttgtagaagtaggaggaaacagttctcactgggaagaagcaagggcaagaacccaagtgcctcacctcgaaaggaggccctgttccctggagtcagggtgaactgcaaagctttggctgagacctgggatttgagataccacaaaccctgctgaacacagtgtctgttcagcaaactaaccagcattccctacagcctagggcagacaatagtatagaagtctggaaaaaaacaaaaacagaatttgagaaccttggaccactcctgtccctgtagctcagtcatcaaagcagaagtctggctttgctctattaagattggaaatgtacactaccaaacactcagtccactgttgagccccagtgctggaagggaggaaggcctttcttctgtgttaattgcgtagaggctacaggggttagcctggactaaaggcatccttgtctttgagctattcacctcagtagaaaaggatctaagggaagatcactgtagtttagttctgttgacctgtgcacctaccccttggaaatgtctgctggtatttctaattccacaggtcatcagatgcctgcttgataatatataaacaataaaaacaactttcacttcttcctattgtaatcgtgtgccatggatctgatctgtaccatgaccctacataaggctggatggcacctcaggctgagggccccaatgtatgtgtggctgtgggtgtgggtgggagtgtgtctgctgagtaaggaacacgattttcaagattctaaagctcaattcaagtgacacattaatgataaactcagatctgatcaagagtccggatttctaacagtccttgctttggggggtgtgctggcaacttagctcaggtgccttacatcttttctaatcacagtgttgcatatgagcctgccctcactccctctgcagaatccctttgcacctgagaccctactgaagtggctggtagaaaaaggggcctgagtggaggattatcagtatcacgatttgcaggattcccttctgggcttcattctggaaacttttgttagggctgcttttcttaagtgcccacatttgatggagggtggaaataatttgaatgtatttgatttataagtttttttttttttttgggttaaaagatggttgtagcatttaaaatggaaaattttctccttggtttgctagtatcttgggtgtattctctgtaagtgtagctcaaataggtcatcatgaaaggttaaaaaagcgaggtggccatgttatgctggtggttgccagggcctccaaccactgtgccactgacttgctgtgtgaccctgggcaagtcacttaactataaggtgcctcagttttccttctgttaaaatggggataataatactgacctacctcaaagggcagttttgaggcatgactaatgctttttagaaagcattttgggatccttcagcacaggaattctcaagacctgagtattttttataataggaatgtccaccatgaacttgatacgtccgtgtgtcccagatgctgtcattagtctatatggttctccaagaaactgaatgaatccattggagaagcggtggataactagccagacaaaatttgagaatacataaacaacgcattgccacggaaacatacagaggatgccttttctgtgattgggtgggattttttccctttttatgtgggatatagtagttacttgtgacaagaataattttggaataatttctattaatatcaactctgaagctaattgtactaatctgagattgtgtttgttcataataaaagtgaagtgaatctgattgcactg

SEQ ID NO: 10538 - DNA, 3105 bp, Homo sapiens
  III.4166 (NM_005073)
ccacctgccaggagcacgtcccgccggcagtcgcaggagccctgggagccgccgccatgggaatgtccaaatcacacagtttctttggttatcccctgagcatcttcttcatcgtggtcaatgagttttgcgaaagattttcctactatggaatgcgagcaatcctgattctgtacttcacaaatttcatcagctgggatgataacctgtccaccgccatctaccatacgtttgtggctctgtgctacctgacgccaattctcggagctcttatcgccgactcgtggctgggaaagttcaagaccattgtgtcgctctccattgtctacacaattggacaagcagtcacctcagtaagctccattaatgacctcacagaccacaaccatgatggcacccccgacagccttcctgtgcacgtggtgctgtccttgatcggcctggccctgatagctctcgggactggaggaatcaaaccctgtgtgtctgcgtttggtggagatcagtttgaagagggccaggagaaacaaagaaacagatttttttccatcttttacttggctattaatgctggaagtttgctttccacaatcatcacacccatgctcagagttcaacaatgtggaattcacagtaaacaagcttgttacccactggcctttggggttcctgctgctctcatggctgtagccctgattgtgtttgtccttggcagtgggatgtacaagaagttcaagccacagggcaacatcatgggtaaagtggccaagtgcatcggttttgccatcaaaaatagatttaggcatcggagtaaggcatttcccaagagggagcactggctggactgggctaaagagaaatacgatgagcggctcatctcccaaattaagatggttacgagggtgatgttcctgtatattccactcccaatgttctgggccttgtttgaccagcagggctccaggtggacactgcaggcaacaactatgtccgggaaaatcggagctcttgaaattcagcccgatcagatgcagaccgtgaacgccatcctgatcgtgatcatggtcccgatcttcgatgctgtgctgtaccctctcattgcaaaatgtggcttcaatttcacctccttgaagaagatggcagttggcatggtcctggcctccatggcctttgtggtggctgccatcgtgcaggtggaaatcgataaaactcttccagtcttccccaaaggaaacgaagtccaaattaaagttttgaatataggaaacaataccatgaatatatctcttcctggagagatggtgacacttggcccaatgtctcaaacaaatgcatttatgacttttgatgtaaacaaactgacaaggataaacatttcttctcctggatcaccagtcactgctgtaactgacgacttcaagcagggccaacgccacacgcttctagtgtgggcccccaatcactaccaggtggtaaaggatggtcttaaccagaagccagaaaaaggggaaaatggaatcagatttgtaaatacttttaacgagctcatcaccatcacaatgagtgggaaagtttatgcaaacatcagcagctacaatgccagcacataccagttttttccttctggcataaaaggcttcacaataagctcaacagagattccgccacaatgtcaacctaatttcaatactttctaccttgaatttggtagtgcttatacctatatagtccaaaggaagaatgacagctgccctgaagtgaaggtgtttgaagatatttcagccaacacagttaacatggctctgcaaatcccgcagtattttcttctcacctgtggcgaagtggtcttctctgtcacgggattggaattctcatattctcaggctccttccaacatgaagtcggtgcttcaggcaggatggctgctgaccgtggctgttggcaacatcattgtgctcatcgtggcaggggcaggccagttcagcaaacagtgggccgagtacattctatttgccgcgttgcttctggtcgtctgtgtaatttttgccatcatggctcggttctatacttacatcaacccagcggagatcgaagctcaatttgatgaggatgaaaagaaaaacagactggaaaagagtaacccatatttcatgtcaggggccaattcacagaaacagatgtgaaggtcaggaggcaagtggaggatggactgggcccgcagatgccctgacctctgcccccaggtagcaggacactccattggatggcccctgatgaggaagacttcagaattgggaactaaaccatgaatgctattttcttttttctttttcttttcttttttttttttttttttttgagacagagttttgctcttgttgtccaggctggagtgcaatggcacgatctcagctcactgcaacctccgcctcccaggttcaagtaattctcctgcctcagcctcccgagtggctgggattagcggcatgcaccaccacgcccagctatttttgtatttttagtagagatggggtttcaccatgttaaccaggatggtctcgatctcttgacctggtgatctgcccacctcggcctgccaaagtgctgggattacaggcttgagctaccgcgcccggccgtgaacgctattttctaagcagccagcagtgaatctaaaactctggaagaagtcttctgtttgaaaggcttatttaagccacacgtacacacactgtcttagagtactgtgagcccaccccacattggtcatcttccctatcacacaaatgatgttattttggactagcttaattttgaaatggtaacaaagtttcctattccatactgttcatttctaatactcttacgaaaactattctaaaggaggcaggagccaaggccaaaagtgaacgtacaggtttaaaatggctgtgataagggccagctggtattaactgataactttacctttgggtttttgttattttgtttttctagtccctacctgtgtttaaattatggataactcgaaagacaggctcaggtgaaggccgagtaatgattttttttgaagtttcaatggtgtgaaataaatttctgttctta

SEQ ID NO: 10539 - DNA, 2846 bp, Homo sapiens; identical to SEQ ID NO: 10520
  III.4167 (NM_021082)

SEQ ID NO: 10540 - DNA, 1984 bp, Homo sapiens
  III.4168 (NM_003102)
ggatccagagatttagattttttataagctttcctgccaccgaaacgggtgtttgggacctcacgaggccctgttcattcttcgtcgctgcgctccccactctgtactggatgcatttactgacgttgttgtctccgtccccagagtatgaacccccaaggtgactcatgcagctgtgggtgcccggcatacagcatggtgactggaatggatgagcacccaataaacatttgttgcaggaatgcaggaggacgggcaggccagcaagcaggctgcctggtttttcccacatgggcttttctgggaaagaagagcttctatttttggaaagggctgctatgattgagaaaagttcatggcagcaaaaaaaggacagacgtcgggagggaaacactcctagttctcccagacaacacattttttaaaaagactccttcatctctttaataataacggtaacgacaatgacaatgatgattacttatgagtgcggctagtgccagccactgtgttgtcactgggcgagtaatgatctcattggatcttcacggtgggcgtgcggggctccagggacagcctgcgttcctgggctggctgggtgcagctctcttttcaggagagaaagctctcttggaggagctggaaaggtgcccgactccagccatgctggcgctactgtgttcctgcctgctcctggcagccggtgcctcggacgcctggacgggcgaggactcggcggagcccaactctgactcggcggagtggatccgagacatgtacgccaaggtcacggagatctggcaggaggtcatgcagcggcgggacgacgacggcacgctccacgccgcctgccaggtgcagccgtcggccacgctggacgccgcgcagccccgggtgaccggcgtcgtcctcttccggcagcttgcgccccgcgccaagctcgacgccttcttcgccctggagggcttcccgaccgagccgaacagctccagccgcgccatccacgtgcaccagttcggggacctgagccagggctgcgagtccaccgggccccactacaacccgctggccgtgccgcacccgcagcacccgggcgacttcggcaacttcgcggtccgcgacggcagcctctggaggtaccgcgccggcctggccgcctcgctcgcgggcccgcactccatcgtgggccgggccgtggtcgtccacgctggcgaggacgacctgggccgcggcggcaaccaggccagcgtggagaacgggaacgcgggccggcggctggcctgctgcgtggtgggcgtgtgcgggcccgggctctgggagcgccaggcgcgggagcactcagagcgcaagaagcggcggcgcgagagcgagtgcaaggccgcctgagcgcggcccccacccggcggcggccagggacccccgaggcccccctctgcctttgagcttctcctctgctccaacagacaccttccactctgaggtctcaccttcgcctctgctgaagtctccccgcagccctctccacccagaggtctccctataccgagacccaccatccttccatcctgaggaccgccccaaccctcggagccccccactcagtaggtctgaaggcctccatttgtaccgaaacaccccgctcacgctgacagcctcctaggctccctgaggtacctttccacccagaccctccttccccaccccataagccctgagactcccgcctttgacctgacgatcttcccccttcccgccttcaggttcctcctaggcgctcagaggccgctctggggggttgcctcgagtccccccacccctccccacccaccaccgctcccgcggcaagccagcccgtgcaacggaagccaggccaactgccccgcgtcttcagctgtttcgcatccaccgccaccccactgagagctgctcctttgggggaatgtttggcaacctttgtgttacagattaaaaattcagcaattca
